United States Patent Application Publication US 2026/0191916 A1 - sequence listing, part 95

SEQ ID NO: 618 - DNA, 1968778 bp, Phocaeicola vulgatus
  source 1..1968778: mol_type = genomic DNA
ggtttcctttatcggaatggctacacaagaagtgaatattaaagcgaatttgaatattgtattaaagtctgatacagaacagcttgaggaagtaatggttgtggcgtacggtactgccaaaaagtcttcgtttacgggatctgctgctgttgttaaaaatgacaaaatagaaaaaatgcaaacgtctgatgtgaccaaagcattagcgggtgcagtgtcgggagtccaaattaccacagcttcaggtgcccctggttctggtacaagtattcgtgtacgtggccttggttctattaacgcttccagtgaacctcttattgttgtggacggttctccttttgatggagatttgagtatgattaatagtcaagatgttgaatctatgactgtattaaaagatgctgctgccaatgcattatatggtgcacgtggtgctaatggtgttgtcttgattactactaaaagaggtaaaataggtaaagctactataaccgttgatgctaaatggggatctaatagtcgtggtgtacctgagtatgatgtaatgagagatcctgctacttattatactacatattggcgagagttgaaaggaatgtatgaggctaatggcgaggctaatcccggacaattagcttcgaacgctttgattaccgacagtggtagtggcttgagttacaatgttacgactgtaggtaataacgaagtggtattaccggatggaacatttaatcctaatgctagaattaaatatgcggataattgggaaaaggaaatgtttcacagcggtttacgacaagaatataacgtaaacatgaacggggctaatgaaaagactagttattatttgtcatttggttatttggatgatgaaggttatattgtaaaatccggttttacacgttactctgcccgtttgcgtttggaacaccagtttaacaagaatattaagatgggtggtaattttgcttatgtcaatacttctactgtagccacttcagctacagaagaacaagaccaaactgctggcaccaatatgttctacgtatcacgtaccatggctcccatttatcctatctacaaacgtgatgaaaatggtaattttatgtatgatagtcatggtcgcatagtgtatgattatggagatactccgggtatgcagcgtcctgtatcaggaaattcaaacgcattaggtagtcagagtttggatgatcgtaaaaatggaaaagattatttcagcggaaacatgtttgccgaaatttcctttttgaaagattttaaatttactttccgtgccggaatagaaaacgataatactcgtcaaatggtatttcaaaatggtgaatacggacagtttactgcacaaaacggtattgcaactcattatagcactcgcaatatgactattaatttgcaggaattgcttacatgggaacgtacttttggagagcattcggtaaatgtactgcttggacatgaaacttatcagaataagtatgattatttatacggatcaaaaaataactttgctttgtgggggtcaacttcattgaatcatgcagtgagtaatccgcaagctggttcttatgtgacagaatatactactgaaggtttcttgggacgtgtggaatataattataaggatagatattacttctcgggaagttatcgtcgtgatgcttcttcagtatttcatccagattatcgttgggggaatttttggtctgtaggtgctagttggagactgaaagaggaaaattttttgaaggacgttgaatggttagataacttaaagtttaaagttagctatggttcgcaaggtaatgactacttgttgttgaatggggtgcgtaaccgttatgcttatatggatcaattcagtgtgagcaacaataacggacaacccgcaattactcaaacatataagggtaatgataaattaaagtgggaaactaactataattttaatacaggtattgaatttagcgtattaaacggacgtttgagtggaggctttgaatttttctcccgctatgcaaaagatttgttgtttaaccgtcctttagcagctagtaccggttctaattcttatccggataatattggtgatatgcgcaataccggatttgaagtagaattaagtggggacattattcgcacaagtaagattaattggaatatttctgttaatgcaactacctataaaaacaaaattttgactttaccggaagaaaaaagagagtccggtatttggaatggtattttcaaaatggttgaaggaggttcgtactacgactattatataaaagaatgggctggtgtagatccggaagacggaaaggctatgtggtataaagatgttactgataagaatggaaatacgactaaagaaacaactaagacatatagcgaggcgacggattataaagcaggttgtgccttgcctgatttgtatggtggtattagtacttcattaaatgcttatggattcgattttagtattgcacttacttatcaattaggaggacaaggctatgattatacctatgcaactttgatgaatagcgctcagggtgcaggaacaaattatcataatgatattttaaatgcttggacaccggaaaataaatatactgatgtgccaaaattaaatgcaaaagaaagtaataacaattctacttctacccgttttttgacttcaacttcgtatttaagtttgcaaaatatttctgtaggttatacattgccgaagaattggattgcaaaattgggttgcgagagcttaagagtatattttgtggcagacaatgtagcactactttctgctcgtaaaggttatgaccctcgtacaaattggaatggcgaatcaaattataattattcggcattgcgtagtatttctggtggtataacaatgaaattttaattgataaaacaagaaagcatgaaaaaaattttaaaatatacggcttttgcagccatggtaggattgtttagcagttgttctgatagtttttttgaggctgaatctggtgatatcattactagtgatcagatggatgaagttgatccggtggcaggtttgaacggtatgtatgcctatttgtataaatttgatacaatgggatatggtgatgaagctcaacattacgattatggttatcatcatattttgttatgttcggatttgtgggggcaggacatgattcagtatagttctaaatatggatggtattatactgattatcaatttaatcagaattctagagcataccaatatatttctacgttctatttttggaactatttgtataaattaataaaatcggctaatgacgtattgaaaacaactacagatgattctaaaaaagaagatcgtggacaggctttaggtatgcgtgcttttgcttatttgactttggtacagatgtatcagcatacttatgcaggtcatgaaaatgctcctgcggtacctattgtcctagaaactaccgagccagatgtattgagcaataatcctcgtgcaagtgtaaaggaggtttatgatttgattgaaaaagatttagtgcaggcacacagtgatttatcttcataccaacgtttgaacagcacttatatcgaccaaactgtgatttctggtttattggcacgtatgtatctgttaaaagaagattggactaatgctgccaaatatgctaaagaggctcgtgcttcttatggagcacctgccgataaggctgaattgatagatgagggttatatcgatatgaacaaacatcatacttggatgtttacctcacatattacaacggatgcggagattgttcagacaggtattgttaactttatctcccacatcagttctaccgcttatggttatgtcacggctggaggaatgttcaagaatattagttctgaattatacagtaaaatagctgacaatgatattcgtaaaggatggtttgcggataaggactttacttatgaaggaggaccgatgggaagtgtagctttacctaaatatgctaatttgaagtatatgtggtatgatttggaaggtaataattgcaacgatctgtgttatatgcgtgctgaagagatgtggttgattgaagcagaagctttggctatgggaggtaatattgccggtggtaaatcattattagaagaatttgtgaaaacccgtcaaccggattatgtatgtgatgcaacagatgcaaaaggaatacaagatgcctgttggttacagcgtcgtatcgaattttggggtgaaggcattgcatggttcgatttgaaacgcttaaagaagcctattattcgtaaatatgaaggaaccaatcacaatttggatgcacaatacgattttccggctgaagatgatatctttagaattttgattccaagaaaagaaattcaagataataatggtattggcgaagaggataataatccaatgcctaatatttaataattctcatattaacttttctataaaagggatgttcttaattgtaggaacgtccctttataattatagctacaattatatttcactataaagtttaaagaaatacctttgatagtgtctttttcatgataataaaaagcttttcttacaattagtttttgtttcaagcattcgttttattccagtaataaatattgtgatatgactattgtaatgtttatttgattaaaataatatggaatttcatttcataaataaatagaacaatggcaaatttagcgaatttatataaattggtttacttatttcagtagaataaaggtagaaaattattttttttatacttctcaaacaatttatatagtagaaaagcaggcaaagcgaagaaatacttttgtgttgattgtcagttctttacataaataattagttccgcaaagactttggtagtttcctttatcggaatggctagtcaagaggtttctatcaaacagaatgttagcatcattttaaaatctgatactaaagtgcttggagaagtgatggttgttgcatatggcactgcaaaaaaggaatcttttacaggatcagcatccgttattaataataagaaactggaattacgtcctataagtaatgttactaaaggattggaaggacagactacaggtctgttaacaacttcaggctcaggtcaacctggcgaagctgccaagatcgtgattcgcggttacggttccatcaatgcctcacaagatcctttgtatgtagttgacggaataccttttagtggagatatgagttctatcaatcctgccgatattgaaagcatgacagttttaaaagatgcttcagccggagccctttatggagcccgtggtgcaaatggtgtaattatgattactaccaaacaaggaaaagaaggcaagactaaggtatcttggcgttctacggcaggttggtcttcacgttccttgaaagcctatgacatggttgaccaaaaagaatttgtacagttaacgtatgaaggtttacgcaacggatatatctttgacaatggatataactgggaagctgccggtagacaagcatcagcagatttaggtggcgttttaggtggagaacaatataatccatttaaaaattacacatggggaacaattatagatcctgcaacaggtagagtgcagggtgatgctacatccgcatggaatgaatcttggatggatgcaatacaaagagacaatgcatttcgtcatgaacaccagttgtctgttaatggaggtacagaaaagaccaaatatatgttctctttgggatatttaaatgaagatggcatcttgattaataccggtttccaacgttataatgcccgtgcaaacataaacactgaagtgaataaatggatgaagactggattgaatgtgtcactttccaattccacacaaaattttagtgattacgaaggttcatctaattcaaatgtgtggtactctgcacaatttatggctccgatttacccggtgtatataaagggagaagatggtaaagatgtattagatgccgatggaaatcgccaactggactacggtgacggtagtgtacaacgcccacagtatagtgatttcaatcccgtaggcggtttggtagatgacaaggctgatataaaaacagatgtagctggtttgcgcacatttttggcatttggctcagattcggaagatgccggatgggctaaaggtattaagctgactttgaactttggtctggactaccggaacaaatctcaaaaatcatatatgaatatgcaccatggtaatcaggcagctgccggcggtttgttgatgaaatataacagaagaacccaatcttatacttttaaccagttactgacatgggggcgttcttttaacttttataacatcgatcttttggttggtcatgaattttatgcatacaaatatgaatttctgtctgccggaaaaaccaatttagtagatggtattcttgaattgcgtccgggtacaaatctatacaatgcggattcatattcggaagattatcgtgtggaatccttctttgggagattcaattataactttaatgaaaaatattatttttcagcctctatccgtacggacggttcttcacgcttccaaaaagataaccgttggggtactttttggtctgtcggtgccaactggagaatttcacaagaaaagtttatgcagaatttgatttggatttctaatttatcagctaaaatcagttatggtgaacaaggtaatgataatctgttaagatatgatagtcttgaaggaggatatgtaccagattattatccttggcaaggactctatccattggaatatccgaatgccaatcaagtaggaggcctgatcggtgctttggaaaacaaaaaactttcatgggaaaaaagcggtaatttaaatgtcggtattgaggcaagtatgtttgacggacgcttgaatgtcagtgctgaatattataaccgcaaaacaacggatatgttgctgggataccccaaggctacttctagtggattctctgaatacaacgcgaatatcggttctatgcgtaataccgggtttgaatttagcttaggtggttcccttatcaaaaccactgattttatatggaacttaacttggatgggctctactgtaaccaataaagtgctgaaactgactggggaatctcctgaaattatcaagggagttttcagtattaaagagggaatgcctattaatacatattatatggctaaatctgccggtgtggatcctgcaacaggagcgcagctctattgggtatatgataaggatgataatggcaacatcactaacgaatatatcagcagtgactatcaaaaagctgcgaacagcaaatattattccggcagccgtatacctgatttatatggtagtatcaataccgatttctcttacaagaatttcgatttgtcaatattgggtacatattctataggaggtaaagtttatgattcattatacgctggttctatggaggttatgtatgcaggcaatacatggaacaaacatgctttgagacgttggcaacaacctggtgacatcacagatgtacctcgtattcaaattggaggttcctacacagcttcagaccgttttttagttgatgcttcatactttgctatcaaaaatatcactttgggctacactattcccaaacaatggctaaagaaggccgggctagagtctgtccgcatattcggatcggtagataatctcgctttattttctcatttggacggtatggacccacagtataacttcaagggcgaaacagactattcttatgctcccaacaagacttattcagtaggttttgaaattaatttctaacaatttaaaagaatacaggaaagtatgaaaaaaatatttaaatacatatttgccgggatggctgcaatgtctgtggtagcttgcagtgaggatgctttggaaaccagtccttcatcttctgtttctggcaacgaattattaggaacagcaactaatgcattagtatcattgaatggtgtatatcgagcaatgtatacagcaggggtttcaaacagctctaacactcatcaatgcttcggtatcacagcttataatctggtggcagatgttatgggtgaagattgcattatgaacggacaaggtagcggctggttttggtatgattgcgtttacaatgtaaaatcaagatatacctctaccggatggcgttcttatgatatgtggaatggctattacacttggatttctaatgtcaattacattttggcagaagaggaaaccatgtctggaagtgaaaccgaaaagaattatgtgcttggacaagcctacgctgtacgtgcttacagttattttatgctggcgcaaatgttttctcgcacttataaaggacatgaaagcgaaccttgtgtaccactctatacagaaccgactgatattgcaacagaaggtaaagggcgcgcaacggttgaagaagtatatcaacaaatcacttcggatcttgacaaagcaattaccatgctaggcaactcaggtaaaagaaaacatatcagccatatcaatgaggctgttgcctcaggtataaaggctcgtgtcgctttagtgatggaagactggcagaccgctttggatgccgcgaatgccgcaataagcaaaagtgggtgtagtatcggcactggaactgcggtaaccggtggaatgaatgatgctactgccaataatgtgatgtgggcggccgaaatcatagccgaccagtccggaatgtatgcaggtttctttacacacatggatgcggatcaagggaaatatggagctagtgctcgaaaacagataaacaaactgctttatgcaaagctaggcacaaatgatgtccgcaaaaaatggtggaatccacaagacgagaataatgaaaagaatggttaccaacaagaaaaattcaagtttaaagattatgcgaaatggacaggtgactatatttttatgcgtattgaggaaatgttcttaaccgcagcagaagcatcttgtcgtttaaatgatgacaaaggcgcacgactgatgttgaacagtttaatgcaagaacgtgatgaggattacacttgcaaaaaaacaggaacggcattaggtaagctcacctcggatgaaaccggttctttacttgaagaaattataattcaacgccgtattgaactttggggagaatttggacgtatctatgatatacgtcgtctgaaacaagggttcagacgtactgcagacatgggctggccatccagtgctttaattgctggtacagatacggaagatcctgagtcgtatgcatgggtattaactatttctcaaacggaatttgatggtaatccgaacatggatcctagcaaagatcagaatccgataggtgatcataaatagtattaatctgtaagcaagtaaattatgaaagtaaataaatatataatcggcatgtttgttgccactgcaactctttttgtatcgtgcaacaccgacaatgaaggagatatatacaatggcacaacaatgggggtgacattcgccacaggtacacaatcggtttcctttccttccacaggatatgagggttttgatgtggaagtcttacgcgcgaaatcttcggaagctactacaattaatttatcagcaacattagttgtcggtgataaagagcaggaactccctgcctccattaccgtaccttcctcggtttcattcgcagcaggggaatttaagaccaatattcatgttacagttggagatataactcctggacagaattataaagtcaagatatctttgccggaggaaatggttacgatagaccagacttcggataaagtcataactgtttatagggattatactttttcttcattaggaactggaacatttaaatctgcggctatggcagaggaaggggaagattttacaacttgggaagtagaagttcaaaaagcagaccagatatcatggtataaagctatgaacttatatgaaaaaggatataacattgtcttcaaagttaatgaagccaatgaggtcactgtagaatctcagccggcatggaagcacgcatcctatggagaagtttttgtttcaggaaaaggtgctttggaagacggagttattactgtgaagctgtcgcatgatgtacccaatgttggtggttttggtgaatttaaagaaatactttacctacctgctaaataatttagatttaagatatgaggaaaagatgaagctttctccttaattatccaatagattattacccaagtatacaaaattaatgtatacttgggtaaatctatatagtaaatcggtctttggaaattatcgataaacatctgttaactcaaattcgattactatataaatgtgcctgtaaagacatatatgttaaatatttagttacatatttggaaggaacacaacaaaccaccatcaatccttatgaactgattgtaattcctgacgggaagtcaaattctgattacacacggaatcttccatcagttttttaatgttcttcccagccaaaactcaaaaaaacgatcatagaccggatatagcatattatgccgtcaaacagttgatatatttcagatataacatttttattaatgtacttcccgcttttctggaaatggtgtgtaacaaattttgtatattctttcagtctgatagatttttgatccaaaatcatagtactttgataaaaagccggaagacttataaaaatttctcccgtcatatgacattgtgaacctaaatatataaaatgggcattgtacaatgttatatatcgatgctcaaaatggctttaacgttctttctcgaatcggatcttgagcaataacttgaaattagtcaatcgccactaggcagattttgtctgcttttcctagatagctaagtatttcgtccaaagtaacagacgttttttgctctctcccatttctaaattccaatttggatctcctctttcattatttcatgcatttttttttcaaaaagattataatcttattacaatacaattatcataatgagatttatcgcaattagacttttttatcgtataaagtaattctgaggtagaacaaaagtagaaaaaaggttatcataactttgtttaaagtaattcccgcagagtaaataaatagaatcgacaaattttaatcttttgattataaacactttatatgttttgttagttccgcaaagactttggtagtttcctttatcggaatggctagtcaagaggtttctattaaacagaatgttagcatcattttaaaatctgatacagagatgcttgacgatgtagtggttgtagcttatggtactgcgaaaaagtcatcttttacaggatcagcgactgctgttagtggagaaaaaatagcaaaaatgcaggtttcttcagtatctaaagccttggaaggtgcagcagcaggtgtacaagtaatcaataccagtgggcagcctggagaaaatgctaaaataagaatccgtggtattggctcttttagcgcatcatcggctcctttatacgtagttgatggtatgccttatgacgaagagtcggttaatgcattaaatcctgccgatattgaaagtatgtctatattaaaagatgctgcatctgcagccctttatggctcacgtgcagcaaatggtgttgtgatgattactactaaaaaaggtatggtagataaatccaaagttactcttgatgcacgctggggagtaaatactcgtggtgttccagaatatgatatcatgaaagatcaaagagaatacgtactaacagcctggaatactttaaaaaatcaatctacaggtgcagaagcttccgaagaattaataggtagcattggatacaatccattcatcggtgtagctaataatgccatggtttcagcagatggcgtagttagttctgcggctctacgccataatgacgattgggctgatgccgcattacataatggtatgcgtcaggaatataatttgagtctgcaaggtggtaacgctaagacaactcattttttatcattgggatatttgaaagatgaaggaatcttaagacatactgactttgaacgtatttcagcacgtgccaatattaatcatactgtaaataagtttattgatatcaatggtaatttggcttacgcaagagcggaaaaaaatgcaggccagtcacaaaatgctagtttgtctaattactctaatgcttttatgttcactcagcaaatcgctcctatttatcctgtatatgcgtatgacgaaaacggaaatcgcatatatgacgaagaaggcaacactgtttatgattttggtgatggtacatacagtacacgtatgggcggtttcagtaatcaaaatgttgcagctaattctgggttggatgtgcatcagactttgaatgacaattttaatggccgtggtactattaacattaatattattgatggtttaaaagcgactgctaacattggttatgatttaatgaatcaaatccgtacagatcacatgaatcagttatatggggatgctgctaatgtgaatggtcgtacttataaatataatcaacgtattgaatcgtttacagcaaatcaacttttaacctatagtaaagcatttggtcatcataatattgacataatggctggtcacgaatcttattcatatacactgaaatatcagtatgctcataaatacaatttttatactattggaaatcctgagttcaacaatgccataactatgagtgatatgaattcatatacacaagaacatagtatggaaagtttctttggtcgtgtaaactatgattttgataacaaatattatctatctgcaagtattcgttcagatgaatcttccaaattccatcctgatcaccgccgtggtactttttggtctgtcggaggttcttggagattaacacaggaagagtttttgaaagatgtggaatggttgtctaatcttaaactaaaagcaagttatggaacacaaggtaatgatggaattcttgatataaatggttatgtagtctatcaaccatatctgaagcaatattctgtaaccaataataacggagatttctctgtagtcgaaacttatcgtggaaataaagatttgacttgggaaaaaagcaaaaatttaaatatcggtttggaagctgcttttcttaataaccgtttgaaactagaaactgaatatttcttgaagaagacttcggatatgttgtacaatatgccttatcctatttcttctggaatttcttacgttccaatgaacctgttggatatgcagaataaggggattgaatttactatttctgccaccccaattcaaacaaaagattttatatggaatttatcttttaacggtacacattatagcaacaagattttgaatcttccagaagacaaaagagagaatggaattattcatggtactgcttctttgttccgcttaatggaaggagggtctatttatgatctttatacctatgaatacgcaggtgttaatccagaaacaggagcagcacaatggtatatggatgagaaagatgctaatggcaaagtgactggaaggaccgtaaccgaagactatactcaggcaagcaaatatgaattaggttctactttgcccgatttccaaggaggtttttcaactgattttgcatacaaaggaatcgatctttctatagctacaaactttcaaattggtggaaagatatatgacagcatgtattcttctttcatgcatgcgggaagcaatattggcagtaactggcacaaggatatcttgaatgcttggactccggaaaataaaaatacaaatgtgcctataatggatggtgcacaaaatagtaatagccaatcttcacgtttcttgataaatgcatcattctttaacatccgtaacatttcattaggatatacttttccgaaagaatggatgaaagcaatatcagcaagcagtgcacgtatttacgtatctgccgataatgtagctttattctctaaacgtaaaggtatggacccacgccaatatgcttatggatattcggctgctaattattctgcgattcgtactttatcattcggcattaatttgaacttttaaaagaatagaattatgaaatatacaaaatatttagcaatattggctgcagcgtttatgatgggatcttgtagcgatgactttttggacaaggaaccttcagaaaatgcatcagaagaccaaattaaagatttgcttgataaagatcctacagctattcaagcatatattacaggatattacaaaaatatgttttctccggaagcacagcaaagtcatgatgatttcggattaaaggcatttgaattggctacagacttgatgggagatgatatggcatatatgacctcacacttcttcgtatatgattatctgcttgacaaccgtgcttcaagttatcgtcgtacgaccacttattggcaagaattatatgctgtaatcagtggtgcaaatgaagtaatcagcggtctgaaagaacaggcagatagcggtgatgagagtgttgagaagatgttgggacaaagttacaccatacgtgcttactgctatttttggttaataaacatgtaccagcaaccttatgaatggaataaagataaattaggtattcctatttatactgaatctgaaaccaaattgaatcgtgttcctgtaagtgaggtctatgaacagatattaagtgatatagataaaggatataattatttgaaaggaaaaggaatagccaagaaagatgaattaaatgaatatgcagcagctgctatttatgcaaacattctttcatttgttaatgattatcccgatcaatggaatgaagttgctaaatacgcaaaattggctattgaaggtggctcactgatgagtgaaaaagaattactttccggctttaatgacctttctttgagcgaagtgttatggggggctgatattaatggtgaaacaaatacattctacgcttcattcatgagtcaagttgatccttacggcccgggatacggtggtaatttaggaaattacaaaatgatttccagtgatttgtatgaaaaaatttcagatgatgacattcgtaaaaaatggtttggagttgatttgggagaaacaaatactcattataaagtaagacaatatgtgcagcgcaaatttattgatataggttctaccgcgcctggttttactcctacaggtgatactttttgctctgactatatttatttgcgtactggtgaaatgtattttgtagctgcagaagcattatatagggcagggaaagaaaatgaagccaaaacaatgctgactacgattatgaaaactcgtaatccaaaatatgaaacatccgcaacaagtgatgcacttttacaagaaattgaacttcaaaagcgtattgaaatgtggggtgaaggtcgtcgtttatttgacatgaaacgtcgtaatgaaagtttggatagaacacatgcaattaatcatagtgcgattgctccaaaggaagtccctgcaggtagtaaattattcatttatcaaatccccgataaggagttaaatgccaatagtgagattactgataaaaacgaatagctaataataggtctataataaaaaagatgcttagattactaggcatcttttttatgtttaaggtagaataaaagtagacataaaatcaaattatttttttatgttataatatatagttgatttatagtttgttataatagatgtaatattgtatatctacaagagagcagaatgctaaatatttgattactagatgtttttttgtatattttagttccgcaaagactttggtagtttcctttatcggaatggctacacaagaagtagctataaaacagactgttaatatcactttgaagtcggatgccgaagtgcttgaagaagtggtagtaacaggatatggagttcaacgcaaagcttcatttactggtgctgctgctattattggtgaagatgttatagccaaaaaatctgatgctaattttgtgaaagcactagaaggagctgtaccaggcgtacaaatgagcaactctaccagtatgcctggtgtttggagcgagatttatgttcgtggacgtggttctttgaattcaggcactcagccattatatgtaatagatggaatgcctgtcaactctgaaacagatggtatgagtacgactacaaataataattttgatccgatggccgcaatcaacccttctgatattgaaagtgttacagttctaaaagatgctgcggctacagccatttatggttcacgcgcagctaatggcgttattgtaatcactactaaaaaaggaaaagagggaaaaatgagcatcaacttagacattaaacaaggatttgtttcaatgggaaatcataatatggattacgccaatgctcaagaatctatgaatctatttgctcacggacgttctgttgcttatggtaacacctatgatgagagctatgattatttgaaaaaagtatatcaaggttatggttgggatggtgtttcatcctacgattggatggatgctatcacccgtaaaggatactaccaagactacaatgtaaacctccaaggacgttctggttctactggttattatgttagtttaggttatttagatactgaaggattgattattggttctgacatgaaacgttattcaggacgtttgaacctagactctaagttcagttgctttactatcggtgtcaacgcttcatacagtaattctacccaaaacggcttttcacaagctacaagtggctctatgtccagcgctactgtagcagctataagttctatgaatcctatgatgcctttctataatgaagatggaagttatgccaatatcagtaattataatcctctagctttatatgatgaaaaagctggtgaaatcaatgaaaacaataatcaaacattgaacttcaacccatatttgcagattgatctcggaaaaggtatttatgcaaaaactaccttaggtgtaaatattgctgatttacgtcaatatcaatattggagtgcattatataatccacaagctgttgattataatggattaggtcaacagtacaattctcgttatacaacaattacgtggaacaatgtattaggttggaactatacttttgacaaacacaatattaacttgttattaggtcaagagatgcaacgaaagaattatttctatgaatattattcaggctctgatttcccatttgcagctgatggaaaaaccgacctttctactgctggaactcctcaaggatcggaatattataagaaagaagctcgattggcatcatattttatggatgcacactactcttacgaggataaatattatgtatctggttcattccgccgtgacggttcctctgttttcggttcaaatcatcgttggggtaacttttggtctgttggtggaaaatggcgtgtaagtggagaagaatttcttaaagataattctattattaccaatgccactcttcgggcctcttacggaaccgtaggtaatcaagatatcgattggtatgcagcacgtggtttctattcttccggatacaattataacgaaaagcctggtatgactcccactagcatctctaattcagatttgacatgggaaacttcaaaaaaatttgatataggttttgatttatctttaattaatcgtatccatcttactttcgattattataatgaagagacgagtgacgcattgtttgaagtaccattgtccatgactacaggtatgtctacagtataccaaaatattggtgcaatccgcaaccgtggtattgaagcatctatcaatgcatctgttatcaacaacaataatcttacatggaatatttatgcaaatatgacatggaacaaaaataagatcatcaaactatctacagatgaacccatagaatatacttatcaaattattgaagaaggacgcccctatcgccaattctatatgaaagaatatgcaggcgttgaccgcgaaaatggtaaaccattatggtatctgaatgaagaaggcaacgaaacgacctccgactacaatgcagcagccaaacgttatgtaggcgatgctgaccccaaagttttaggtggattcggtacaaatttaagttggaaaggatttgactttaacatgaactttacctatagattaggaggaaaagttttcgattccggagcttcattcaccggatttggtatggccaatcgtactccgttgaaagacgttgcattaaattcatggacagaagaaaataaagatgccaaatatccacaatatatttatggagatcccaataaagcaactcaaacttcttctagattcttatatagcagtaatttcttacgtatcagtaacatgaccttaggttacactgtgcccgtaaatctaacaaagaaaatattcattcaaaaattacgagcttatatatccattgataatttatatacatttacatccaatgattttgttggatataatcctgaaacctattccaatggtgtaattgcgtggcaatatccagtaacccgtacattcatcggaggtattcaattaagtttttaaataaggtaaaatttaataaaggaaagatatgaaaaaatatattttaaatgcaattgccatttttacatttgcaacaggactttcctcatgtggtgacagttttcttgaaactgacaactataaaggagtggacctagaaggagggctcaacactgtaactaacgttagtacagcattaaatggaacttattatcaattattttattatgcatttgctggtaactatgctttagctattggtgatattcctacagatattacttattggaatactaaaaccggacattttgatggtatttatacctatacttttacagatacagatacttatttaaaaagtatttgggagtatggttataaaacagctgataatgcagcacgtgtaattcaagcttctcaagcactatataacaatgcaagcgatgatgaaaaaacagaacttaatatgtatatggctgaagcttatgctctaagaggttacgcacaattattgcttactaatatttatgggcaccaaataaaagtgaatggacaagatttttcttccgaactaggaatcgtcataattgaccaacccaaagaagcattgactaaaatcagccgttctactgttggcgaaagctatgaagccatcatcaatgacctaaaaaatgcattatcccattttgaagcagctggtaaagacagaggagaactccaatatttaggaaaagctgctactaatggtttattggcccgtacctacctatatttagaaaattgggatgaagcaagaaactatgcagaacaagcactaaaaacagcgggtattactactttaaccaacgatgctaatgcatacaaagctctttataatagtgaaatatcaaattccgaaagtatgtttgctttagctattactaatacaacaaactggtcagctaattcatatggaactttgtggtctacatacaactttagtcctagtcctaaactaatttcaatgtatgcaactaacgattgccgtaaaattcttattgatggaagagataaaacttctacagaatctgaacctgtttacacaggtggtaaaattgctcacttttcgtcaggtaaccctgctcgtggaactaattatattgtaaatgctccggaaatgtatttaattaaggctgaagcaaatgtacaattaaacaaattgaatgaagccaaagaagctttattagtagtagccaagcgtaatttagatataaaatcaacaaacgatttaccgagcgaaaaagaaaatcttatgagttttataaaagacgaacgtgctcgtgagttattccaagaaggtatgcgtctatatgatttgcgtcgctggaatgaaagagtcagtgtatatgccaacagtgctccagccatcaaatttacttatactaattacgaaatatcaaatttagtatttcctattcctagtgcagaaatcaacgctggattcggagtaactcagaacaattggacaaatactcttccaaaataaataatcacattttttattttgaaagaaaaatgcttttcaagggatgcccccatacacaggagcatcccttgaaaacaaatatcgggcattccttatgcaaatacattgtttgtgccaacagacttatccatcaacatcttccattcaattttataagaaagaagcgatttcccgccaatccctcatatcaaaaccaggtttaaaaggcaagctcttctcaccttttatattataataaacatttcccatccctacgttttttgcaccttcaacgtcattcttccaattatctccaatcattaaagaagtatgcagctcggactgcgtagccgacatggcaaaataaaaaatctccggaaacggtttatgtactcctatatcctctgacaaaactattttcttaaaatatccttccacaccggcagaacgcatcttctgctcttgcaattccctaaatccattggacaaaatatacagattataagcggatgccaaatattccaaagcctctcttgcatgaggcatcagtttcttcttgtaaactatatcatcaaaaaaattatccgaataggcttttaccaacgctttatctgcaacgcctacctgcaacaacggataggcaaatctttgctcattcaactcatcttttgtaatcctaccagcaccatattcattccataactcctcattcttcccgctatacaaagtataaaaatgcgaaaaagaacgaaaataacgatcaaaatgatatttatcatacatgtcttggaatgtatcacgagcgttttcagtaaaagcccataccgtatcatccaaatcaataaatatacttctatacatacaacataaagcagattaaaaaagggttgcgtcactcacggcacaaccctttcacagaacaataatttaaattccttatttcacctgaataacaagatagcgtgatacgctccagaattcagtaggatttgtaatcttcaaagtcagctggcctttcgcatctttcaccagttcatatgaaccagccggatgtgtagtcagcaattcggcgcgtttagaatacaacttgatttccttatcagtacgaatatcaatctgagtaaaataatccttattaaaatccgcacttttcaggacatcacctttttcaagaattttctggtccttcaattcagattttgtaccaaaaacaaaccaagcagcattcaaagctttatcctggctggctacagttgcagccttcgcctcattttcagcggtcagttcacttacattctggcttaaaccggccacagcatcgtccaactcagcgatacgaatattttttgaagccaattcagcctgcaaagtctcaatctgctgctgtttagcttccaactccttcgtcaggttggctacagctttcttcaactgagcggaattatactgactattcttcaattgcttctccagtttcgcaatctgctcacggtttgactgtaatttttcactgatgaagcgaatatcttcttttatcttatcagcactattctcacgaatagaaccactctgtaagtctacacgattctcagcttcatttatctgacgaaaaccttcctgtacttcattgaaagcacccatgatatcgtccaattcagcatttctgtttgacagttctaccatcaaagaatcattttgagccttcaaggcatctttctgagctccattaccgcatgaagtcaataaagctacagataacaacgataaaaatactagttttttcatttgctttacattttaagtttattcatttttagtcctctttcccaccgagtacgattacgatttcacctcgcggctcgttttgagtgaaatgcgctataacttcagttaatgtgccccgaacactttcttcgtgaatttttgaaatctcacgacatacggaaacaggcctttcggcaccgaaaaactcggcaaattgagttaaggttttcaccaaacggtagggtgattcataaaatatcatcgtccgtttttcttcttgcaaagaggtcaaacgggtcactcttccttttttttgtggcaggaatccttcaaagcagaaacgttcatcaggcaatcccgacgccaccagcgcaggtacaaaagcagtagctccaggcaaacattgcacctcaatgccactcttcacacactcacgcactattaaaaatccgggatcagaaataccaggagttccggcatcagatattaaagcaacagtttcgcccgctttgatgcgattcacaataccttccactgttttatgctcattaaacttatgatgagactgcatggcgtttttaatttcaaaatgtttcaaaagaatacccgaagtacgcgtgtcttccgccaatatcaaatcagcctctttcaacacacggatggcacggaaagtcatatcctctaaatttcctactggagtaggtacgacatacagttttcccataaaacaattgcattctgttatactggaacaaatgtagaaagaatttaaatgcataaagttaattgtcccaattatttaacagatgttgcacttttgtttaacattatatcttttattaataaatttccaagtgaaaataatcctttttcggggtacaagtcgtacatttgcactcagaattaatctaattgttataactaaattatggtagttttttcagaagaccacatccaggaaacacgtagaagaggaagaatagaagtaatatgcggctcaatgttctcaggtaaaaccgaggaactaatccgccgtttgaaaagagcgaagtttgcccgtcaacgggttgaaatattcaaaccggccatagatacacgctattcggaagaagaagttgtatcacatgacagcaactctattgcctccacccctattgattcttctgccagcatcttgcttttctcctcagacaaggatgtagtgggtatagacgaagcgcaattttttgacgaaggtttggttgatgtatgcaacaagctggctgacaacgggataagagtcatcgtcgccggattggacatggatttcaggagagttcctttcggacctatacctgccttgctggctattgcagacgaagtaaccaaagttcatgccatttgtgtgaaatgtgggaacttggcctatgccacccaccgaatcaccaaaagcgaaaaacgggtcctattaggggaaaaggcagactatgaacctctttgccggacctgctatatggaagccttgaaagaggaaactgaaaataaataacacacactttatgatacagaaaaaaataacattcgatagttttatccgcggaatattgacagcgatggtcattatcggcattctatatctggtcaaccgactcagcggagtgctgcttcctttcttcatagcatggctgatagcctatcttatctatccgatggtcattttctttcagaacaaattgcgtctgaggaaccgggtaatctccatattggttgttttgctggtattgctgtccattatcactttagcatttgtaggacttgtaccaccaatcattgaagaattcggcaaactgaaagaattgctcaccgcctattttatcgaaggatccaagcaagcagccattcccggcacagtggccaatttcataaaagagcacatagatatgttgagaatacacgaagcgctgaacgaaagcaattttgcgaataccatgcgtaatgttcttccccaagtatgggcattgctgacccaatctgtcaatattgtattcagtgtattcacctcattcatcatcctgctgtacactttcttcattctattagattatgaagccattgcacggggatggataaaactgatccctgccagacaccgtgaaatgacagtacatattgtcacggatgtacaggacggcatgaacaaatatttccgcgggcaggcgtttgtcgctttttgtgtagggattctgttcagcatagggtttcttattattgatttcccgttagccatcggtttcggattgtttatcgggcttctcaatatggttccctaccttcagcttatcgcttttattcccacagtcttattagccttactgaaggctgcggatacaggagagaatttctggtggatattattttgcgccttccttgtgttctgcatcgtacaaattatacaagacggtctgattgtaccgaaagttatgggaaaaatcacaggattgaatcctgctatcattttattatccctctccgtctggggggcattaatgggaattgtaggtatgattatcgctttgccttgtaccagcttgatgctttcttactatcaaagatacatacgaataaaagaaaaagaattttccggagggatagaacacactgattttcagcacaaagagaattctaacgaaaaataattcaaaaaaatcaagtaatatatttgcatatttcatctaaaacgtctacctttgcactcgcaattcggaagaatagcaataacaaaggattgattcgctagctcagcaggtagagcacaacacttttaatgttggggtcttgggttcgagccccaagcggatcaccaaagaatcagagagttacaccaaagtaactctctttttttatgccttaaacgcgccggtttacatggttcagttaaaccgagagttaaaccaagaatggattttccggatcagttttccaaaatattcttggcgtatcagcctttcccttcagctcccactagaaagttcgaagcatttatgccctcataccctcactgcaaacataacaagctaactataaaccatttatgcgccaatggtaaaaatacttgctctcactcataccctcatgccctcactacattttcaaggaaaatttcacatagcatactgtttatcaatcatatactctcttttttataaactattccagcttgacacaaagtagagcattccaagtctttttcaatgaaaaagcaccataaaagatttgtacctccaaggaatgacggcttacgatccatcggcagagataaaaaacacccctgccctgatgtggattttcattctgaacgtatggaagttcatatacatacatataagaatgaatataatatatgtataaccctgtacatacaccggattcatcactaaaagattttacctgtatccccaaacctttcccgccgtatgattaaaggttttcttcccgtctgttttatctccgcaagcctttggagttatctccataagctttggagttatctcccaaggctatggagttaactccaaaggctatggagatagaatacatccgcataaaaagggttaatctggagatagaaaaggcttaggcaacagggctggatgcgatatgcattcttttaatcccgccgacggattattatttttccgtatctcctcctcttgaatgtcacaacagcagaaaaaccggaccgacaaacttctttcacacacactacagatgtttataccgagcctgaaaaaagagatgaatggaacaataaaaacagccttcattaaatttctaccacctcaatttaccaactgttcaaacaaatggccacactgttctatttctcccttttaaacataaataataccgatggcttgttcattcctagaataataaatacctttgcagccttaataaaaaaagcaatgaagtttgatataaaaaaacatatttatttaatacttttattcatcttatctttcactgtagagacagctcaatcacaagaagttaccaacatccatatagcagcgacagatacggtgccaacctataccagcgactctgccgttatcaatttcttaaaggatgccggcattcctatcacccaaaacagcaaactgaaattattaaaaagcggtcgggccaaattcatcgatctctttgaagaaatacggcatgccaaacatcatatccacttagaatacttcaattttcgtaacgattccatagcgaacgcactatttgatttattgggagaaaaagtgaaagaaggagtggaagtcagagctttgtttgatgccttcggcaatttgtcaaacaacaagccattgaaaaagaaacacatacaagcaatccgtgacaaaggaatcgaaattgtcaagttcgaccctttcaaattcccctatatcaatcatgccctgcacagagaccatcgcaagattgtagtcatagacggaaaaataggatataccggtggcatgaacatagccaattactatataaagggtctgccggaaataggcgactggcgcgacatgcatatccgtatagagggaaatgccgtaaacgaattgcaggacatcttcctggccatgtggaacaaaagcactaaacaacacgtaagcggaagccaatactatcccctacgaaacgattctactttcaagggaaataagaatgtagccattgtagaccgcattccgaaaaaagaacccagactgatgaggcagacttatatcaagtccattgatgccgcacaggataaaatacaaatagtgaatccctatttcactcccattccaagcattaaaaaagccataaaacgtgcgttgaagcgaggcgttgaagtagaaatcatgataccgggcaaatcggatattccttttacccccgatgccgcgttctatacagcaaacaagctgcgtaagaaaggagcaaagatttatgtgtacaatggcgggttccaccactctaagatcatgatggtggacagcctgttctgcactgtgggaagtacgaatctgaacagccgcagcctacgctatgactatgaggtcaacgctttcatttttgacaaagaaaccacacatgaactgagcaccatgttcgagcatgacaagctggacagtaccctgtttaccaaggaagaatataaaaaacgctccggatggaaacgcttcgtcggttggttcgccaatctgttcactccgttcctataaacctctgccacttccccaaacaaaggtttacagattgtttcatttcctgcaaggacggggcttatcccatccgcaagtatgctccatgcagtaaagcttgacaggtcatcatcaaagagagcaatgcctgtaagcaggagaaaggttactccaccatcacggacggtatccctgacaagtgtggaaaaccacggcttagctgcaaggaaacgcttttctctccgtatgtttcactttattatagaacaaagataaaataaatcgctttttcatccccataaactacgatatttttcttatttttgcccaaatatgtaattccgcccgagaaggcataagagaacgagacagaacgatgagagtagttgatttaataaaaagcacggacaatacggctttttcttttgaaattctccctccgctgaaaggaacgggtattgaaaaactgtataaaacggttgatacgctacgcgaattcgaccctaaatatatcaatattacaacccaccgcagcgaatatgtgtacaaggagctgggaaacgggctgtaccaacgtacacgccagcgccgccgtcccggaacagttgctgttgccgccgctttgcagaacaaatacaatataacgacagtgccacatatcctgtgcagcggtttttcccgcgaagatacagaatatgtattgttagatctacaattcctgggcatcaccgacttgttggtactgcgtggtgacaaggcaaagcacgaatcagctttcgtacccgaaaacaacggttacaaccacgccatagaactggaagagcagatcaatgatttcaataaaggcgtatttgtagacggttcccccatcaaggtaacaggaactccgttcagttatggagtagcctgctatcctgaaaaacacgaggaatcacccaatatggaacaagatatttattggctgaagaaaaagattgaagcaggagctgaatatgctgtgacacagatgttctatgacaaccgcaaatatttcgaatttgtagaaagggtaagaaaagaaggaatcaatgtacctattattccgggtatcaagcctttccgcaaattatcccagctgaacatgatacccaagacgttcaagatagacttgccgcaagaactggcaagcgaagcgatgaaatgtcaaacagatgaagaagcggaaagtcttggcatagaatggtgcatacaccagtgccgtgaattaatagcctgtggggttcccagcattcatttctataccgtaagtgccgtgaacagtgtaaaggaagttgcaaaagcaatttattaaacagtaaataaatgactataaaaagcaatgttatttaaagatgtaataggacaagaggaagcaaaacagcggctcatagccgaggtaaaagaaggaagaatccctcatgcacaactgatttgcggtcccgaaggtacaggaaagttgcctttggcaatagcttatgcccgttacatctgctgtgaaaaccgtggtgaacaagatgcctgcggaatttgccccacttgtgtgaaattcaataagctgatacatcccgacctgcatttcgtttttcctgttatcaagaaaaaagccggaaaggataccgtatgcgatgatttcatagcagactggcgcaactttgtcctgcagaacccatattttaatctgaaccattggctgaaagagatgggagcagaaaaccaacaggcgcaaatctttgtaaaagagagcgatgagattgtacgaaaactcagcttgaaatccagtcaaggcggttacaaaatcatgattatatggcttcccgaaaagatgaacgtggaatgcagcaacaaactgctgaagttactggaagagcctcctgccatgactgtctttttattagtatccgaagagcctgatgccattttgcaaacgatccaaagccgtacccaacgatttaacattcatgggatcaaagaacctgaaatctcaaaagtattgcaaaccaaatacggactacaaccggaagatgctgacgatatagcacaccgctcagaaggcaattttctgaaagcactggaaaccatacatctgagcgaggaaaacaaactgttctttgaactctttataaatttgatgcgcctttcctatcaacggaagatacgcgaaatgagacaatggagcgatgcggtagcctccatggggcgtgaacgtcagaagaattttctggcctactgccaacgtatgatacgagaaaacttcatatacaactttcatcaacgtgatttagtgtatatgaatcccgaagaacaaaatttttccacccgtttcgcaccgtttgtcaacgagcggaatgtgatgggcataatggacgaacttagtgaagcacaattacatataggacagaatgtgaatcccaaaatggtgttctttgatttctctttaaaaatgattgtgctattgaaaaattaaaagttgagaattgagcattaaaaaataacagaaccgcatggcatttatttcttagttctcaattttcaattctcaattaaaacagaattatggacaatgaattcaaattaaagaacggaagcggctgtttgtgttgcaaaggctgcggacgacaggataagcagctgaacacctacgactggctggctgatattcccggcaacaccgaggaacaggaaatggttgaagttcaattcaagaatacccgcaaagggtattataagaacagcaacaaactgaagctggaaaaaggggatatagtagctgtagaagcaagccccggacacgatatcggtacagtaaccctgacgggaagattggtacctttgcaaatgcgtaaggcaaacatcaaacccgatgccgaaatcaagcgtatctaccgcaaggcaaaacctgtagatatggaaaaatacgaggaggcaaaagccaaagaacatgacacaatgatccggtcccgccagatagccaagaatctgaacctggacatgaagatcggtgatgtggaatatcaaggcgatggcaacaaagctatcttttattacatcgcggacgaacgtgtagacttccgccaactgatcaaagtactggccgaagctttccgtgtacgtatagaaatgaaacaaattggcgcccgtcaggaagccggacgcattggcggtatcggaccttgcggacgtgaattgtgctgcgctacctggatgacaaattttgtatctgtatctaccagtgcggcacgttatcaagatatttctctgaatccccaaaagttagccggacaatgtgccaagctgaaatgctgcctaaactatgaggtagacgcttatgtagagtcccaaaaacgccttccaagcaaagaaatgactttagaaacgacagatggtacattctattttttcaaagcggatattttgaagggaactatcatgtactctactgacaaaaacttcatagctaatgctgtaaccatcaccgcacgccgtgcttttgaaattattaatatgaaccgacggggtgagaaaccggaaagcttaaccgaatctgtcaaaaagaacgaacctcaaaagcccgttgatttagtagaacaagaaagcttaacccgattcgacaaacgaaaaggcaacaacagcaaccgaaagaaaaaacgtaagccggaaaataacggtaataacggagaaggtactcccaatgaaaacagacgtccgcaacaacctaaagagaaccggtcacaacaacccaaagaaaaccggccacctagagaaggacgtcccaaacaacctagagagcctaaagaaaacaaggctcagcagccacgcgaagagaacggaaaccgccctaaagaagaaaatcgcaacagggaaagtcgcaaccgggaagaacgcagtcgtgaaaatcgggaagacggaaaccggaaccgcaataaacgccgccccaataatggtaataatgaaggaggcagtgaaaaccggaataacggaggaggaaaggaaaatgacaacaagaacaacggaaacaatagccaaatcccgaatgaaaagccacaaactcctgtatcaactaaagaataaactgacatggctgccaatactcatattggcagcctgtcaaaacaatatcatctatcactcttacgcccccgtcccccttgacggatgggataaaagtgatactcttgtttataccctgcccaattctatccctaccggaaattacgaagcagaaatcggtatccgttatcaagaatcttatccttacagagatatttggctagaagtcagccataacacaaaggatactttgacttacgtcacagacactttacaactttttctggttgacgaagctggaaataaaacaggaaatggtctttgtggattatatcaatgtgacctgccttataaagcatctattcctatccgtacagaaggaagcgcacgtactttccgcatcgtccatatcatgacggacaacccgttgacgggaatcagcgatataggtatccggttgcgcaaaccggaaaaccaataagctctaacgttttccccgccctgcatcaatacgcaagaatacaaaaagcaagatcgtaaatccccacaaagaagatcccccataactgaaaaaaggcagtggtatgcctataacgggggtcagtcctaaaaccatacctatattaataaacagatggaataagaaaatgcttaataccgaatatccataaacacgggcaaaacgagtatgctgacgctccgccaccacaataagacgcaaaataagtccggtaaaaagaaacaatacggccgccgaacctataaagccttcttcttcccctaccgtacagaagataaagtctgtatcctgttcaggcacatacttcagtttagtctgtgtaccattcaaaaagcctttcccccataaacctcccgaaccaatagcaatcttactctgattcacattgtatcctgcccccgccaagtcttcctccataccaagcaccactttaatacgtatctgctgatgtggctccagcacattattgaaaacataatcggcagaaaaaagaaatcccaccgaacctatcgcaaatagagcaatataaaaataattacgcatacgttcatgcatagaaaggaagatcaaatagaacaataaaactacgcacaatccatattggaaccaagtaatgtcaaaagggataacataatacgaaaataataaagccagcaaggtaccaccaacaccaatccctccgatataccacactaccgatgcttttttgcaataactattaactaataaagcagaaaggatgactatcagcagcaacacagaaaattcaccgatggaagtacagtcatccgccatcaattcattgccaaaacggattccaactacaaaatagaccacggcgcaaatcccggcaaacaaaatagaacccggcatcccctcccggtacaacataaaaaagaaagccagataaaccaaagccgaccccgtttcccgttgcaaaataataagcagcatgggcagcaacaccatccctaccacaggcaatgaatactttaacttactcattgtaaacccgtagacattcataaatttagccaaagccagcgccgtggcaaatttagcaaattccgccggttgcaaacttacaggtccgaattttatccatgagtaagatcccttagtatcctctgccagaaaaggtgttatcaacaacagcagcatcatgcctccatataaaatgtaagcaaacatatcatacaacttatcctccaacatcatcaggataaatccgagccccaaagagcaacagatccatacaaactgttttcctgccctagtgtcgaaactaaaaaaatcaatctcaccataatcatagctggctccacatacgctgaaccatccaaagataaccagcatcagataaatgcagatagtcatccagtccactgatttccatatactatcgttcgtgtatgccataatctattcgtctgttttgtatttccgccgctttcgcctcactttccggtgaaagttcgccttttaaatatttctccatcatcaatgcaccgataggtacaccataggttgctccccaacctccattctctacatagactaccacggcaatcttaggatcattcattggtgcaaaccccataaaagcagaatggtcctttccacggttttgcgccgtacctgtcttgccacacacttcaattcccggaatattcgcattacggcaagttcctcccaatactgccgaacgcataccttcgactaccgtctgataatgttcacggcttactttagtataacgtttggtcgtatacagggtatccaacggctcgtcttccacttctttcactacatgcggagtaatataatagccccggttagcaatagtagccccaaggttagcaatctgcaacggagtagccgtcacttccccctggccgatggaaatagaaataatcgtcagtccgttccatgatccccgatagttcttatcataataagcagcattcgggatcatcccacgcttctcacccggaaggtctactcccaaaggataaccaaatcccatagaaaccatataatcacgccatgtattcatggcagtctgtacagaaccatacttcttcttcgcccctatcatgtgaaacaacccccaacagaaataaccgttacaggaagttgcaatggcaggcaccaaaggcaggggcgacccatgagagtggcagcccaccctaagaccggcatacacaaagccatgatagcaagaataggctgtctgaggagtaataatcccctcttgcaggaaagtcaacgcctgagtagtcttgaaagtagatcccggtgggaattgccccataatagaacggttcagcaatggtttccaactgtcacgcgccagttccagatgatttttaccccgttggcgccccaccatcaatcttgggtcaaaagtgggagcagataccatacaaagtatttctcctgtggatggctcgatagccactatactgcctatcttcccttccaacagacgctctcccaacatctgaagctctatgtctatacctagtttcagattcttccccggaacgggagtcttgtcatatttcccgtccatataccgtccctgaatacgtccacgggcatcgcgcagtaatatctccactcctttctcgcccctcaactgtttttcgtatgagcgttccaccccctgtttccctatgaagtcaccgcgtacatagtaatcatcggcttcaatatcccccttggacacttctgcaatatctcccagaacatgagcagccgcattgtaattatactggcggatagtacgccgctgaatatagaaaccgggaaacttgaacagtttttcttggaagactccgcactcttctgccgaaagctgggtcataaatacctgatgagtatatggagagtagcccggattggaacgtctgtcctttatctcgcggatacgctttttaaaatagtcgggggtaatattcaatgttttacataaatcaagcgtatcaaggttgtgcacctctttcatcaccatcgtaacgtcataggcaggttggttatacaccagcagattaccgttccgatcgtacatcaccccacggctagggtattgtgtcttgttcagaaaagcgttgctatcggcgttctttttataatcctcactcataatctgcaaggtaaaaagacgtatcaggtaaatcagcacaataacgatcaccgatgcaccgattacatatttccgcttctccagattataatctctttccactattttttcctcctgattgcctcagcacacaatatacaaatgatggttattgaggcatctgtcaatattttcaacaataagacaggcaggttgaagaatgaaaaagtatctatgacaagtaaaatggtacaaaataagaaagtacacaataagatataccggaagaaaggcgagaatcccatactcttgatacccggttcaaaatcctcgacgctatcgcggagcgtgactaatcgtaatacaggttcacgcataaaagccagtacagtggccgcagccgcattcatccccggagtgttgcctaatatatcgactgtcaatcccaacaggaatgcccatatcataaggacattacggctaactcccgaattgtacttcaaaataaaatagataaaaaagaaaggagtggcatacccgttgatatgcatatgattcagcaccagcacttgcaacagtaccagtccgataaaccactctattctttgtagataagtcaacatcaaccttcttacttagtcgtttttacctgcttttccaactccaattgttcctcctgccctttttgggcaattacgcgcacatcattcaaacgggcgaagtccgtaaatagtttcacccgcagcaaataagacaagccatcgtgactatcggcgatatcatctaccgtacccaccggaatgccggaagggaaaacagcactgtgtccactggttacaatggtgtcacctaaagaaaataatgaatgacggggcatatcctttataaaagcaaattcggatgaaccgccatcccatttcaagaagccgaaataatcactccgttttatcttacagctaatactgcttttggaattcaataccggaatgacaatggagtaatgtggagaggtgagataaacaataccaaccacaccgcttccatttaccactcccatctcactacgaatgccatccgcttctcctttgtcaagtgtaatatagttatcagcatgagtcacactgttatttatcacgctagccttgaatatatcatatcctgccagtgcttcctgcttaagctgttctacaccactgctgtcttccgtcgcttcaatcaaagctttacggatactctccaactgcaattccagttccacatttttctgtaccaactcatcgttgatcgttttcagatgaaaatatccggtaacattattggctgcatcatacatagctcccgaaacaaaattagcagatgtaaagaacgcactcccctgataactgttgaagcggaataataaagcaaaactgattatctccaaaagaacaaagagaaaccagtagttatactttaaaaagaaattcagcagatttttcattaataccaattgttcaatgtgctaatttgccaatgtgccaatgtactgcgctatccataccgcatggcattagcaaattagcaaactgcctcattagcaaatcatttaccgcatcaaaaaagagaaacgatctacattcttcagtgcaataccggtacctttcgccacactcagcaaaggatcttcggctatatggaacggaatattgattttgtctgtcagacgcttgtccaaaccgcgcagcaaagcaccaccaccagccaaataaataccgttcaaaacaatatcagcataaagttcaggcggagtctgttccaatgcactaaggatagctgtttcaatttttgcaatactcttttccaaacaatgcgccacctcctgataacacaccggaacttccatgggaagagcagtgatacggttaggcccgcgtacaatgtaatcttcgggagcatcatctcccaaatcagtcaaggcagcgcctacatgtatcttgatacgttcggccatacgttcactcaccttcacattgtgctggcggctcatatattcctgaatatcggctgtaagatcgtcaccggcaatacgtatcgaattgttggaaacaataccacccaatgaaatcacggcaatttctgtagaaccaccacctatatcaacaatcatattaccttcaggagcctctacatcaataccgataccaatagccgcggccataggttcaaaaatcaaataaacatcccgtcctcccgcatgctcagcactgtcacgtaccgcacgaagctctacttcagtgctacctgagggaactccgatcaccatacgcaaagaaggagaaaagaaacgattacccatgttcactttctttattaaaccgcgcatcatctgttcacaggcattaaagtcggcaataaccccgtcgcgtagcggacgtacagtacgaatattcggattttccttctcgtacatcattttagcccgttcgcctacggcaatcatcttgtcggtacggcgatcaagcgcaacgaccgaaggttcgtccactacaatcttcccgttatttaaaatgatggtattggcagtgccaaggtccatcgcaatctcttgtgtaaaggagaataatcccataaattcatttacaatttagcaatttacaattgacatttgcaatttaccatttacctgaacaatgctgtataaacagtccgattgtagccgcaaatggtaaattgcaatgatcttagtgtttaaagtgacgaatccctgtaatgaccatagctacgccatgttcattgcagtattggaaagtcaactcgtcttttacagagcctcccggctggataacagctttcacaccctccttatccgctatctctacacaatcggggaaagggaagaaagcatcactggccatcactgcgccattcaaatcaaactcaaatgattttgctttttcaatggcttgtttcaatgcatccacacgtgaagtctgacctacaccgctagccagcagttgtttgttcttggccagtacaatagcattacttttactattcttcacaatcttatttgcaaataacatatcttctatttcagtcgccgtaggagctttttcagtaacctgcttcaagtcggcaggagtttccacatccaggtctctttcctgaaccaaaaccccattcaataaagaacggaattgtttcttcggcaatttagcttccttacgaaccaaaataatacggttcttcttctgtcccagaatctctaatgcatctacatcataatccggagcaataattacctcaaagaacagtttattgatttcttccgctgtttctttatcaatcacggcattagtaaccaacacacctccgaaagccgacaccggatcgcctgccaacgcatctttccatgcttccagcacagtagggcgcgaagctaatccacaggcattattatgcttcagaatggcaaatgtcacctcatcaaattcatcaatcaaatctacggccgcattgatatccaacaaattgttataggaaatttcttttccatgaatctggtcgaacatcgcatccagatttccatagaaataacctttctgatgaggattttcaccataacgaagttgtttttgttcttccaccgcgcaacggaaagccgaaccttcaccaccatcaaaatagttaaagatagcagaatcataatgagaagaaacagcaaacgcttcttttgcgaaccaacggcgttcctcgcgtgaagtagtagcgccatgttccagcaacatatcacggaacggcttatattgtgcctgactagcgataatcaccacatcattaaagttcttagcagcagcacgaatcaaagaaataccacctatatcaattttttcgatgatagcttgttcttcggcccccgaagccacagttgcctcaaacggatacaggtcaacgatgaccaaatctatttcgggtatttcatatttttctatctgttgcatatcttgttccaaaccacgacggcataaaatacctccaaagactttaggatgcagtgtcttcacacgtccgcccaaaatagagggataagtagtaagatcctccaccgctttgcaagggaaacctaaagattcgataaactgtcttgtacctcctgttgacaggaactctactccttcttcgtgtagtttggttataatctcgtccaaaccttctttgtgataaaccgacaccaatgcggttttaattctcttagcctctgacattttttatagattaagtatttgggctacaaaggtataaattttcactctataaattccacacataaacgtgaaatattatttatccactcatatttgtttcaaaaaagaagagatccgccactaaatatggataataataaattaaaaatcaagttgtgtgaatccgtgcaatccgtggcgaacaaaaaaacgcctgtaacacaaatgtaacatatatgacattttatcataatatacctcccgtacctttgcgcccaataaaatagagagacaaaattatatggaaacaatgtttttgggaatcgtcgtattcctttttctgctagccatattcgatttggtagtaggcgtcagcaacgacgcagtgaactttatgaattccgccatcggtgctaaagccgcgtcattcaagaccatcatcgccattgccgctttcggtatcttcatcggcgccacactgagcaacggtatgatggaaatcgcacggcacggtattttcaggcctgaacaattttattttcaggagttaatgtgtatctttctagcagttatggtaacagacgtagtcctattggatattttcaattccttaggaatgcctacctccactaccgtatccatggtattcgaactattgggaggtactttcgttctagctcttatcaaaatagcaggagacgaaaccggaatgctaggatttgctgatctgctgaatacggaaaaggcattgtccgtcattttaggtatcttcctctcagtagcagtagctttcttcttcggcacattagtacaatatctctcccgtcttctcttcacatttaattatacaaagaaactgaaatacactatcggactgttcggcggtattgctgttacggccattatctacttcatgttgataaaaggtctgaaagattccgccttcatgaccaccgaaaacaaacattggattcaggaaaacaccttgatgttagtaagttgcagttttgtgttcttcaccattctgatgcaaatattgcattggtgcaagataaatgtattcaaggtggtggtaatgttaggtacttttgccttagctatggcttttgcaggcaatgacttagtaaacttcatcggtgtgcccttggcaggcttctcagcttatacagacttcatggctaatggaaacggtgaaccaatgggatacttgatgaactcactgaatggtccggctaaaaccccatttctttttttatttttagcaggcgtcattatggtatatgcgctgattacttcaaaaaaagcgcaaaatgtagtgaagacttcggtagatctctcgcgtcaggatgaaggtgacgaaatgtttggttcttccgctgtagcacgcagtattgtccgttctaccatgagcgcttcggaaagtatagctaaaatattgcccgacaatctgaaacgatgggccgacagccgttttaacaaagatgtgatgattatggagaacggggcagcatttgatttgatacgcgcttctgtcaatttggtactggccggtctgctcatagctttgggaacctctttgaaactccctctttctaccacttacgtaactttcatggtagctatgggtagttcattagccgaccgtgcctggagccgtgacagtgccgtataccgtatcaccggtgtgctttctgttatcggtggatggttcatcactgccggagccgctttcactatctgttttgtggttacgctcatcatgtattatggaggcacattcgccatgttggcccttattgcacttgccatcttcttattggttcgcagcaacatacactacagcaagaaacagaaggataaaggcaaagacgacatattctcccgcctcattgccagtaaagacaaagaagagcgttggagattactccgccagcatgtaaataacacattggtagccgaaatggcattcaccaatgaaacctatcggcagataaccgacggtttcatcaacgaaaatctgaaagctctgcgcaaggccgtgaacaataccgacaatcagaaagaaatgttaaaaaagatacgccgtaaagaaatactaggtctgcgccgtatagacaactttactgctatcgagaaaaacacttggttccacttgggaagcaacagttgtgaacaaatgctttactgtctgaaacgtatctgcgatccttgtaaagaacatgtggacaataagttcaccccattatcggaacgtgccactaacgagttcatccctatccgcgatgagatgaccgcattaatgaccaaggctactgaagtacttgccaacaaggcctacgatcagactgatgccttgctacgtgaaggcgcccttctgaaaggcaagatctctaccttgcgcaaagaacagatggaccgcatacaagaacgggatgtcaatgtaaaagcttccatggtgtacctcaatgtattgcaggaatcacaagaattggtttcctactggcgtcatctgttacgcgccgaccgtatgttccagactgatttgaaaaaataaaaagatttatattcctattatatgttttttaagataacttctttcctccaattgaaggaaagaagttatctttgtttcgtatatatagacattattcaaacaaacctatggaaaacctcaaaaaaattatcaaacagttccccaaagtgggtgaagtgaaagaaatcaaagctttgacatccggcctcatcaatcagacttatctggtaaaatcggtatctcctgaagagcctgactatgtattgcaacgaatcaaccatttaatatttaccaatattgaaatgctgcaacacaatatagaagtagtgaccagacacatccgccaaaagctggaagccagacacgaagaggacattgaacgtaaggtactccattttctaccttccaccaatggcaagacctatttctatgatggagaaggttattggcgaatttcaatatttattccgcgttcacaaacattggaaacagttacaccggaatcttcccatctggcaggactgaagtttggtgaattccaggccatgctggctgatgtgcccgaacaactcggagaaatcatccccgatttccacaatatggaattccgcttaaaacaattacgtgaagccgtatccgccaacatatccggccgtttggcagaagtacaggacatagtggacgctatagaaaaagatgctgatacgatgtgcagcgctgaacgtttttaccgtgaaggcaaattgcccaaacgcatctgccactgtgacacaaaagtaagcaacatgttatttgatgaaaacggaaaagtgttgtgtgtcattgacctggacacggtaatgcccagtttcattttctccgatttcggtgatttcctccgttcggcagccaataccggcaaggaggatgaggctgatttaaataaggtgaagttcaacatggaaatcttcaaagcatttaccaaaggttatattgaatcggcccggactttcctgactcctctcgaaatagaaatgctaccttacgctgccaccctgttcccctatatgcaagctgtacgctttttagcagattatataaacggagacacgtattatcaaacccggtataaagaccataatctggtacgcaccaaagcgcagtataaactgtatctggaagcaaaatccgctacaccggacatgaaggcttatatcaacagtctgctataatataaaaacaacaaggagcacaaaggtatcttaatgacacgaacctctgtgctcctttcatattcgtccggcaatgatcctaaatctaccgtttcggtatatctaccgatttttcacttttccctttcagatgttcggaaaagtaatcaaccagtttccagtagaaatattcattcatatcaccgaatccatgacgctgttgaggaagaatcagcatatcaaaacgcttcccggcacgaatcaaggcgtcaactacccgtaaggtattgcccggatgcacattattatcaatatcaccatgaatcagtaacaaatttcctttcaattgcttcgctatttcaggattagtagcaatcttataaacgaaagttgtatcccctttctcactcaccacctcttttacgccgtgatgcgtttcactccaccaacggttatagatattgttatcatgatttccggcacaagaaacagccactttgaagaaatccgggtattggcacatagccgccgtactcataaatccacctcccgaatgtccatgaataccaaccttatctatatctataaaatgatgacgctgcgccaattgctcgatagcatatttatgatcggccagcggataatcacgcatatttccatatccataattatgataccatttagagcggctaggatgcccgccgcgttgtcccacagaaataacaataaatccggcctgtgccaaacggtcggtacgggggctcatacgggtaaacggataataaacaccttccacctgtggcccaggataaacataatccacaataggataaaccttagttgagtcaaaattaaaaggtttatacatcacaccatacagatctgtcacgccatcagccgcctttaccttaaatatttccggaaatttataaccggcagcaaaaagctgtgaaaaatcactctcctgaatatccattaccttattgccattagtatccagcaggatggcgcagggcaccgtatttacacgcgaatagttatccaccacaaaacgagcatcatcatccacttccacacgatggaaataatctcctttggtcagtaatttcaaaccgctgccatccagattcacacgatacaaatgttcataataaggatgttctttcgcattcattccattggcagtaaaataaatcacacgcgccttgtcatctactttcaagatttcctccacgtgccagggaccttttgtgatacgatttttcaaattaccctgatcatcatataaataaaggtgtgcccaaccatcacgctcactccattgaataatttcctttccaccattcaagactcttaaaggacgagtttcctgataggtattcatccgttcctttattactggtacaacagaatcctgtcctatcgtataggaacaaacatcaatccgatgtaaatcacggctgctgcgggtcaggaagaaacggttgttatcaccctgccaaacggcagcctgatcttccataccacgctgtttttgcatcattggtttgtattccaggccaatgctttgatctttataagctgctactttaatttccttacgtttattatcaaccaagtcaaacaagtacaggtgttctatgggagcttccttttctcccggcatctggtatttataagtttccaatgtgggacgtggacgggccatcgaatttattacccataactctttcacagcgcgatcgtcagaaactgtcatagcaaaataacgtgaatccggagaccacactccacctacacgacgacgcttgccattacataaagtatctgtattcaacatactatagggaataccatagccaaaatccttcatgccatctgtagtaagctggatttccacgatcgtactatccttttcattttttttcgccttttcataatcttcacgactcatgcgatacaaattcaaatccttggcataaatcaccgttttaccatcaggagagaccgatccccaatagattttcttcaggtcgtcttctttatctttcagatgggtcaatttacgggtaggatagtcataagaaaaataaaagatttccttctcattcttcttgtccttcttatccttgccatctttctttggtgtcgcatcttttgttgactttacttcaaaagtaaaggtacgcccatcttcttccgctttcagatttgtgattggcaaatggcgtgcctcaaagggatcttttacaatttcggtaagctgggaagctaattcatccctatcaaacaaaagcttctttgtccgggcagccggatcaaccacataccaaaaggttccttcacttgttttgtactcgaaccagaaattattacctttctggaaccaatgcggatccaccacagtagaaaacaacatggtgttcaatttttcttgtgtgtatttctctgcctgcagatattccggcaagcgttcctgcgcttttgcaacagaaactgtcgtacacaaaccgcccattaaaagggtaatgaatagcattttcctcatagattgaacttttatcgtgtttataaaaaacaaacatacacaaaattcttcatttaacaatcttaaacaaagaattttgtgtatgtttgtttcatttatccttttcttatcagaaactataccctgaagtaaaactaaccatatgattccgtatccttaaatcattctgctccttattatattttccccaagccaaatcatacccgacagtaaatgaaatccgtttaacagcaatcccgacagaagccgttcctccccaatccaaacgaggggacgcttcaaaaccaaattcctcatttactgtttttcctttaaatgtgccaaaccggtaataatcattccggtattcgtactgtccaacacctgtttcttcatctatattatattttgaggaagaaacataagcattagtacgtccaccaattcctacagctacataaggtcctactgctaatttaagacgcacatcatcacaaagtttaaaaccccaatgagccataacaggcaattgcaaataataacgcgtggactcaacattcgttttttcataatccatgctaaatcctccccctgttgatatgtttccccagctcataggatgatacccacctttctgcattaagatataaaccccggacttcaagccaaaagaaggcttctttcccaccccttcctttaactgatacaacacaccggcaccggctttaaaacctaatgtaactgatgtcccttcattttccttattcactaccaagccggcttccggcgtaacactccaacgagactgagcgttcaacatcatactcgccaaaatacctgccataaataaaattacttttttcatctttttcttctttttagttcattatctatgtaaaagactaaaaattcagaaaaacccccattgcatatccggaaaaataataaaataacatgagcaactcactcacataacaaaagaaacaccctacatttaaacatatcgttcaagaaatcaaaaaaaacaaacgctgcaaaaaccaaccaatagcagcaaaagttatcgcttatttttcgcattctctttatattcggtaggtgtcataccaaaacgttgtttaaaacatttgctgaaataacgaggatcattaatacctaccatataagcaatctgcgtcatattataatcaccactctctatcaattgtgcggcacgtttcacacgcatctctttaataaactcaatgggggcaagtcctgtcagggtcttcagtttcttgaaaaagacagaacggctcaccgcaagctcctgtaccaaatcatccacgatcaaatcgccattatccatattcttctccattaattccgtcagtttttccataaacttacggtcatgggaagacatctcaggctgtgtttgctgttcttcctccgcaacaggctgaatattcatcagattcgcacaatacaactgttgcaacttgacacgttgtgtcagaatattctccaccctggccttcaggtaagtagcactgaacggtttcgttatataatcctcaactcccagttccataccttccaacttactgtccatatccgttttagccgtcagtaaaacgactggaatgtgactggtcgccatattagcacgcaaatcttctgtcatggtaataccatccttttccggcatcatgatatcactaataataatatccggaacaaacttcaaagccttatccaaaccttcagccccattgacagcctctatgacgttgaaatttgagatgaagatactacgcaaaaagaaacgaagttccaaattatcttcaaccagcaacatcgttttgctttcattcctcttctcttcatgtccctgaacagattcttccacctcttccggcctcatttcgacagaatcagagagaatgaactctacattctccgtatagtgctccttgcctttcaaaaactcaaccgtgaaacaactgccctccccctctttactatccacacggatagtcgctttgtgcagttccaccaattccttaaccaaagaaagaccgataccagaactttgctgattaaacaaattcttgtccaacagattttcaaaacggacaaaaagggaagctttcttgctttcagaaattcctataccttgatcctgcacaccaatcgccacattatgttcattttcatgaatgaaaagcgtaatcatcttaccctgtggagtatacttgaaagcattggaaagcagattgaagacaatcttttccaacttatccgcatctacccacagtttcaaggaaggcatttcactttcgaatacaaaatcaatatgatgctcttcggccagcgattcaaaattatccatgatatggtgtacaaaaggaacaatatctatctgctctatacgcaacttcatcttatttttctgtattttgcggaaatcaagaatttggttcaccaagcgaagcatacggtcggtattacgttctactacatgcaattgctcacgtacatcatccggcaaagtcttgtttttcagaacatattccacaggacctgcaatcaatgtcagcggagtgcgaagttcgtgagaaatatttgtaaaaaagcgaagctttatatcagaaacctgctgttccacagacacttcatgtttcagacgataaatagtaaacaatatatatactcctgaaaacagaatcaacagaaaagcaagaatataaattgccatagcccaagccgtttcccaaaacgaaggctgaatggtgattctcaaactacgctcattctctacccaaaccccatcactattggtcgatttaacctgaaagacatactctcctttcggaagattagtatatgtagcggtacgctgtctgtctacataattccattctttatcaaatccgcgtaaacgataagcataacggatattttcaggataaatcatatccaacgcagcaaacgataaggttacaatattctccttatgtgaaagcaccagatgttctgtattattgagtgactgccgcaacaagcttcccggtacgcctggaactacctcctgattggatatcttcaaagtacctaaaataatggatggaacataattactcttcttaatgtgctccggttcaaaataaagcacgccacgactggtgccaaacaaaatagtgtcgggaccaagcttcaacgatgttccttcctcaaaacgtatcttaccaccaaaatccctttcattataattctcaaaacgttgttcggacggaataaatttactcaatccgttttccgtacttatccacaagtttcctgcgccatcctcttctacagacaacaggatatctgaaggcaggccattcttcactgtataagatttaaatatagctcccccttctccgttcatggaaacaagccggttaagaccacccccaaatgtagccaaataaacttctccttgagaagtggttacaatccgatatacgttattgttgctcagacaattcatatcatcggggatacgtgcataaagatggaacacaatcgactccggatctttaaaatcctctttaaaactaagcgcgccatcactgctccccacccatatattccccttcttgtcagaagtgatatggcgtacacggtaacaacggtcatacggaaaacctttcaggttatttctagaactaataaacacatatttcccttcaggagttttctgaatataattcaaccctccaccgaaagttgccacccaaatgcgtccatacttgtcttcatgtaaccagtaaacactattatgactcaggctataaatatcatcttcatcatatttgaatcgagtaaacttaaaatgggtcccctccttttctgccagaataataccatcccctttggtcgcaatccaaatgtttccgtgagaatcttgcatgatatgataaggaactccccgtaacggcctgccagatttggctatatccccctcttcagtcagaataccctgaaaatctaaatcagaagaataaatttcaatctgaccatcccgttttcccatccagatgcgatgttcgctatcttcaaacaacgcacgtaccgtattggaattcaagtcataactgtgacccatgcggggataaatatggaactggcttcctaaaaaagtaatcttctccaaccccttagaatgagtacataaccaaagattgccttgcttatcggataacatggaatgtaatttattggaaaagtgccaatcgggtgaatcggggtcattatagaaaggtaacagccgatttgcctctctgtcataccaagaaagccctcctccttgcggatgtacccacaaattaccgttcaagtcttcacaaatatgaaaactgggataggaacgatcggcaccacgaagctccacttgcatcttttcttgcttaaatacttctgtcaaaggattgaaatgacaaacctttccccattcggtcatctcaaaccatgcttcctgcttactgtcaacataaacagaacggaaagcgtctgccgggaattcgggacaattggacttattatagactttacactcttttgtatccgaatggtacaatatcaatccttcatgggcagttgttatcaacagccccgtaccttttatttcatttatagcaatcactttatcctttaccggcaattcccaaagacgaaagatttcattctgcaaagaatagcaccatatccgtcctctgtctgatccaaaataaagttcgtcaccataactgcaaaaagagtagaaggcctgtacgggttcatctttgcctgactggatattcacaaaataagagacaggctcttctttatcattcgtaatcttcagcagaccgttatcagtaagcaaccactcttgattgtaagcatcgctaaaaacctgattaatatgaacggcatttcctccacgactatgagtagcatatacttgggtagttatactgtaatctttagggtttgttttcacacggacagccccctcattttcagaaagtagccaaatgacactgtcgggcaatattttaatagaagagaaacgcatgccctcctcttcaccttcggcaggaatttgttcgaacttctctgttctttggtcaaaacgatacacacgataatcatacgtttgcagccaaatataattataagggtctacttccaataagtctacccggttgttagtcatagtaattttattcccttgtctggctttataaactttgaagtcataaccgttgaaccggttgattccatcccaagtagagaaccataaaactccattatggtcttgtaccatgctcatgatggagttctgagacaagccgttttccgaagaataatgagtaaagatacaattaggctgactttttgcatgaaaaaagagcagcaaagtaagtataaacagaatgtgtcttttcatttcgtagattttcatatataataggcaaaaatacataaaaaacgagagatactgatatacaagctcctaaaaaaacaaaaggggaaaagttaaatcccccctttatcattctactcttccctgacactttccataggaacaaatagaattcctccctacagtgacaaagtattattactggtagaaagaacagcttatctctttaaattctgcaacaacacatttccattttccaccggattccatccgtcatcacctgccaaaatctgtgcttcattataattactgatatcgttcagctgctttccaaacgaagcacgcgaagcggtagccgccccttctcccgtattccggtattcagcatagaatacggtttcctcattttcttttttgccccagttgttccaacccaccggaagaatatgctttcccaaatcacaatgaatataaacagcctgtgcataaggacgccaaggacgggacaaatacaccttctgagcctcagccacacccgtcaatttacagcctataaaaacatagccatattttttgccttgatctgtagaaggagcggtaacatacccatcacccaaactatggatggtgcaatccttaaacaatgccgtagaccagccaaaaataaaatccaccgtaccctctatataacaatggtcataaaactgacgactgtctttgccataagtgtacaaagtatcctgatttccccaaaaacgacagtttttgaaataagcgcgatctccactaacaaaacaggccactgcctgccccactctgccggcactattctcgaaagtgatattctcagcatagaaatcgggagcatagatataacaggttgatgaaccggaggtagacatttcttctccgaaatagttctttttagaagcaaaatcatcatttgtcagaattgctccgtcctcacctatcaaagaaacactaatcttgctttcaggaataaccactttttctttatatacccctttacggactagaatagtagtgcgtcctgctttacgaaaatcggggacagcatgaatcgcttcctgaatggtaaagaaatcaccactgccatcttttgccactacaaaatcataatgacgtacaaaaggtgccaatgcaggaacctctttagctatagcatccaccgtcaaaccagcaatagtacgcgccccatatacattcaggtgcgtattatcctcacgccctttcggacaagctgcacacacaccttcaggaatccacatgaacaatttttttgaagcctccggccccatctcctgcaccaaatcatgcgttatcttgttcatatccacaaaaggcacatccaactcttttgccacgttacgcggagactccaaatattttccatgaatatcaatcaacacttctccatcttgagaaacactcccctttgacaaatccttgcgcacatcatcttcggctaccgcatttttattattccggaaattacgacggacaatggcattgaacaacacgggaattccccctttagcacgtgtttcttttacaaaacggcgtagattggcatcaaaagtagatccgggatcagtatgacgtttctcatcggccttctcatcattatgcccaaactgaataaaaacataatcacccggctttactttattaattactacctcccacaatccttcatcaataaaacttttagaactccgaccatttctagcatggttttccacacgaatattctcactgaaatatcctcccagcacatggccccatccacgttcctgattacctccctctaagggtttgttggccatagtcgagtcacctatcataaagatagtaattgtgcggtctgccgtaaaagcagaaaacaacaacaaggcaacaaatgccatcaacatcttaattttcatcgctttctattttaaattttgattaaagaactcaagtatatcatcctgtatctccttactgcaaaaatggggcaaatcatagaacttggtggtcaacagattttctaccgattgactcttccatacatcctgcatggtagagaaagcgctttcaacgccctttacaggaaaaagtttgtcccgcaagccattgatgaacaacatcggtttgggacaggcgatagatgccacatgaggataatccatccaattccgtattccgggaataatcatggaataagcagacccacctttgttctgattattggtaagtgtcattaagctatctgtagtattcatccagcacacagcagcgcctgccttcaccacatctgtagcggcactgaccatccaggcacgatgtgctcccatggaaaaacccatcgttcctatcttgtccttatgaaccattggcaatgaggccagaaattccgcgctacgaatatcatcccaggctatcaaggctccccaagacattcccatctgtaacatattggccgccaacgcttgctgtgagtcatagcgtactccttccttacgtccccgttccccccaaaacaaggcatccacagcaagcactacatatccgtgacttgccagataatcacctacatactgtttgtcataacatttttccgcccaatcgtccgcatcggccagtacagatgcttccacaccgaacggacgtaccatcttctctttccctatcgaaaaatgtgcaccgtgatcgtgaagcagcaatactgccgggaacgggccattcccggcaggaaccaacagataagcaggaacacgagaatattccgaaacactgaacaaaatcttctccgccctatatccattccgttgctcggtatctatcacttccttatcaaaagccgtagcaggaggagcaggcaacatacaatccaataacgtttttcgagcttcctcacgccacttttcgaaatttcggatggaagaatttccccatgccataggataagtcaggttttctttcatcttctgatagaacagcggcatatcattctgcgtttcataacgcatagagactgtttccaccttttcctgagcagaagccgtcagacttatcccgaacaacaataaacaaattacagtattcttcataaacctatacctaacaaactttacttttcaaggtaactaattaattttatcatattatcaatataatccccaacagagatgcacaattctccggtggtacacggataaggtgatgtatcgtgctcgtcccctacaaaggtagctatatatttcgtttcctcactaggtcctgaaacagtatatggcttatacgggttcgaggttgactttaaaggagagagccagcaaccgtccttagtcagtgatttcaccaatttccgggcaacttcttccgtagcttttccacgtaaacgagtataatatttaggtaaaggaaccaaatgatcctgcagcaaaggtgaattcttcgccaattcggatacaggaagttttttcacttcctcataacgacgacgcagttcaccaggattcacaaaagttgccgaattataatgagctattgtattttctatattctgatctatataataagtaccgtttttcacattacttcccttacgatggacatacagtggtttaccagtatcaggatctacaaaacgaggaaccaaaatagcttccggattagtcgactgactcttccatttcttcacatccgattccggtaatttcattgattccaaaaaacgaattgcagcaggaatccccgacaggaaacgagtatcagctgtaagtttatagtaatccatcattaaattaacaagacggacggtagtaccggtgttcacactgcgcggttcataagaacgggcatgagccggtttcaaatcatctactgtatattggtccgcccagcctgcataaggttccccttgttgaagggaaatcatcaagtacatagcacgcataataggctcctttaccccttgcaaccccattgcctgatagcattgaatcaaaaactcggtcgcatcaggaatcacatcatcattcagagtaataaaagacgaataatctttcttaccttgaaaagggtgatcatacatcaaaggataccgttgaggccatccacccaccggatattgacttttcaagacaaaatcaatggttttctccaaagccggacggaaagcaggatcatttttttccacatacatacgaagtagaaatttggcagcctccatagtacccgcatcatcgtaagtcgcatttccataataatgttgaaattcttccagacgccagccatttttaccaacggtatcataccaggactttaaggagttctctcctgcaaaatcgaacacataattccatccgccacattcaagctgtccccaaatcaaggtgttagccacttttttcgcagcttcataataatactcatctcctgtagcatgataagcgtcaagcaacaaatgaccgacagaaggagttcccggcggctgaatccataccattgtcctcttggcttccatttctccccatgagcgggacatatccggcaaataattccatacgaagccaccattataactcactttgtccatcataaaccgagtggcggttttcatcgtatttataacttggtcatctaattttttattagtttgggctatacctacacaagcaaaatttgccatgcacaggcaaaggacaattctttcccagtttttctttaatgtgcttttcattgttgttttagtgttttgattcaagtttaaatatcattatgaagcaaaataagccattttccggagcttggatttgtaatatttggtcttttcctcgtatattttaatcacgacgaactaccctccccatattataagtatatttgaagaaaagttttagttattcattttatattaaatgcaagatcatgaatcgtaaggtaagaaccgcattgtatgcttgcgccttgatggcaccactaatattgcagagctgcaatgcacaaagtgaaaaaaaagagagcaacaaagagtgtactgaagaaacaaacaaaaacactgaaaaaaaggttatgaaaacaggtagtgaaaacttcatttttgcagaaggcaaagaatgggaacctgcaggcgaaggtgtagtgcgccagatcatgggttacaatgatgacatcatggttgttaaagtaaaatttgaaaagggagctgtaggagctgtccaccatcatatccattcacaagtgacttatgtggaaagcggaaagtttgagttcaccatcaatggcgtaaagaaaattgtatcagccggcgactgtctgtataaggaaccagatgctgtgcatggttgtgtatgtctggaaccgggtatgctgatagattgtttcagcccgatgcgtgctgatttcctggaaaagaaatagacaagccatatattccatccactgcaggagcagattgctgtgccctcctttgggcatttaatatgctcctacagtggaaatgaattctattttttaatctgcaaaacaaatgggacaattgcttaaccttatcaaatccggtaaatcataatatttcaaagcaccatacaacacattagaatacatatcccactgcataggcctctcaatgtattccttccaagtcttcacgctatgttttatctccacactgttgattctttcatccaaataagcagcatgaattgcaaccggaccataaataccattagcaaataccttgacggggtgtcctttcagaaattcgtgttctgaacaaaaatcaagcaaagtcaggatatcgactacccgttgtcccataataggacgtcctatatgcatactgatcattgcattacgatattcacggttccaatatttagcatccgtataaaatgcagggtccgttgtttcccctaatccgcgcaaatctgccaacaacaaaatttttccttccgtcaaggcagcagcaaaatttgcatattcactcaaataagttcctttcccctcttcctgtaaccttaactcaacaggagaatcagcattcgctctggacggaataataagaatacaaggaacaggcatctccccttcccttataagctgaaatttatattgctcatattcacgcatagaatcatgtccggttgcctcaattcttattttatggtcaggaagacctttaagacctaacaaatccaacatctttgcctgaacagttttctttcctttcgaaagaaacgcctcacgcttggaagcccactcatccagctgattcacattttcctgcataatactgagtgctccaggcatagatacattcacctgtcctcgagtcgtacaaagcatatctgacaactggaaacggtcttgtgccgctttcttcaccggagattgatcatctttcaaccaacgtttgaaccaactgaccagcttttgccttttttcaactccaagtccatgaccggtttctactgtcagcatatccaccttttcgggaactcccaatactttatagcactgttgtaattcagcatatccttgctgcgccccccacaaatcgacaaaatcatatttaccgcttaaaatcaataaaggccgtggagccatcattaaagcaaaatcaggtacttccagttgttcacgcccttcgtagggtatatgttggcaaccgtcggaaggaccttgcaactccatagtacgttctcgggtagaaaagaaactacaaatggccgctacctttacacggggatccaaacctatataataagcggtctgagtgccaccgccggaagatccatagactccgatatgctccggatcaatatccttacgggtcagtaaatagtccaaagcccgatgattgtcccaatattcctgtgccgccaaactagtaccaagcaagttaaagcccgcattcagtaaggtatgttccgtggtagccccccgtgtcagcggctttccttccctgtcaataagttgcaaccgttctccctgccctatgggatctaccaccagtacagcaatgccattggatgccatcaacatagcggcatgagacgaaggccctttaccattcaatccatgtccgcaaagttccaatgttgccggaacaggaacagtcgtgttctccggcatataaagatgtgctgtgacatagcggccgggcttgctttcaaaaattattttctctatatgataacccgtaccttgtaccttccccaccacctgagcatttaaattccctttctccggaaaagtacctactatttgtttatatcgttcacggcaaccctccagatactcctgcatcccggcaggagaagcaaacgcttgttgaatagccgactgccgatcagcaaactgccgatgtacatcacgcatcagataagaattataagcggtactttgactccaaggtaatgccttgaactcaccctgagcagataccccaacagtccccacccatattcccaaacctacacataaagtgcgaaaaccgatgatttttctcatagaatcaatccttaagttattgtaccacaatttcaattttctgacggttatctccggctgtcttcacatacagacgtttatgctccgtatcataaaaccagcctgtattccggtctacatctgcaaccgatgaaagaacgggcaacgatttaccattttctatcacagattgcggagcgttctgcaaataagccttcaccagataagtgtgtctggcaggtttgtacttccctaccggtttatctgcagtaaacgtccaactaccatcagcgagcctgctggtaaagcgggtcaatgaaccaatccctttttgataatccattgatataccatcatcttcatacatctcgtaagaagaaatacctgacggatagacatccaatgttatcacatctacaggatgctgatctacccactgcatagcaggttgcatgggaataatagctccggcttttatatagacaggcaacacatccagcggagtaagaaaagacttatattgacggccctcgtaacgctcaccggtttcataatcaaaccattctccaccggggaaatagacatgctggctcagtgcacctttggtagtgacaggacaaaccatcatccatggcccgaacatatattgacgtgtcagctgataggtattctcatcctgaggataatccatcactaaaggagtcatcatgggacgtgccgttttataaagctgataggcattactataaatataaggaatcaatgtataacgcaaactatcgtatttgataaaattggccaaggcctccggaccataagtccaaggctcatgataacggggatggtccataccgaacaccatagcgataggtgaaaacataccgaactgtacccaacgggtatataattccgtatcgtaaggagaatattgttcaaatcctcccatgcaatgagtccagttacctacaccactcataccgatattaagtcctgcacgtatcaccggttcaaaccactgccattcactcccccagtctccggcccatatataaggataacgctgaattcccgcataaccttcacgggtatgtgtcaaccccctcatattattatattcctgaaatttacgatagggtgcttccgcataagccaaaggaaaaatattatgaagtcctttcaggtccatcgtccctccgacatccgtcttcacaaacttagccccgatggaagctactttcattactccattctcccaccaccaatctaccgctttcggatcaaagaaattcactactccttctgtctttgctccgggatacagcacatttccctgttcacgcgccttatccaacagatgatattcagggccattatctaatatggaacggatatgaagccccaccatctttacattttgcgcatagcaactatcaaacatggctttcggatctttgaacgtattgcgccattcaaagcaacaaccgccatttccgtaagtggtattaaacagtctccaagtagaatccagccaaagcaaatcaaaaggcactccttcctcacgcaaacgtttacataaagcaggcgggtatttatcggaagtcatctcttcattcttccaggttccaccggaataagtaccgacatgcaaccccattgcaaaacgaggaagcatgggggattttccagtcaattccgtatatcggtcaatcatggtataaaaatcgggaccatacataaaataatagtccaaatcaccgccaaaagctttgaacgaataataatcactactatcccaccccatattccattcggtagcaaacggagtatgaaagaacaaaccatatcctttggtactcatcataaaaggtacgggacaataattggcacgtaaaatatcttttcctcctacagccggttttatccctcttcccaactctacattcagatagaccttacgccctcgctgatccatgaaatccatacgctccccaaaaccaaagaaatgctcatccggttgtagaacagctttcgtcttgacagaatccttataaaaacgttgttccgcaagttccgtataaagtagtttgccgtttttatcggaaacagacagacagaacggattcttggtagcctctataatcagttttccggtcgtaatcaaccatgcagcacctttatcttccactgtatagtgtacaggagtaaaatcatatttccgaaccatccactgctcattttcagcgaacacggtaccttgagaatgacgtacacggaacatatcatctgtacaaaattccaatttcacatttccctgaggcagaagaaacaacaaatcatttcctgtcttcttaaaagaagcattggccgcccatagccctatacaatacaggcataaacaaaagcataggattcgttttttcatggtatctgttattttatttaaaatcaatcatattgaatatcagttttttggctacaagtccggcagccgaatcattaatgatgttcccatagatatccaatgtagagaacaaaacactacccttacccatcggtacaatccccatagcagttccgatagccataggataagtatgataggctccgaccagcaattcttcaccttccatcaccaatcccatacgctccacccctgtatgtatcaatgcctgataaggccagttgagagcatttccgacaggaagttccttgaaaatatcatgcggcttattaaacatcaccccgcccagccagttggttccaacaaagaatttgtccttaaacaccgctttactattagccgctataaattccgaccactcatcagcactctgaataataaagattttggttccatcatttacagcacgttccattaaacgctgtgcatccggcatcttatcattaggaacagcccaatccagacgacaacgcgcgttactgcgaggatgcctgaaacgaatctctatatcggcagacttgcctccttccaaatagacttttccatcgcccaaatgctctttcttcctggtaatttcatatattttcttaccattgacaaagacttcaatcatactacggtcattactctgaggaataatcgtatattcaccactgacagagggaagtattttaccactccatttaataccataaccatcaagcatatacacaaaaggacttggtgtagctccttcaatagcactcagattaaccaccttggccacttcatgataaacttccttctgaaattccatatcctcataatagaccacatccaatcccggtttgccatcggcagagcgtaacgcttccatcggcaccattgtcaattgatctttcttaggaggacgggccaccataatccaatccaactttcctaaattatcctcgtaagccgcaaccgcttctttcgttttacccttcaagaaattctgtaaagcgtttccatcttcccaaacggcccctttgccatccaacatattggatgccagatttacagacaatatatcatcatacccagttgtaacaacggaattttccttacatagttttgcttgaattctacaaagtcctccagctgcaggaacaggtatttttacatctttcaccaacaactgaccataaacctcacctccggcggcttctgtttcataagtccctacctccgttatatttccttgagagtccgtcaccgagattttcaattgatgttttccccggacattcttctcattaatcagataaaagtcaacggtcacctctccccctgcggcagcaacctgttgcctggtctttaccgctacatacaaaggctgattataacgagctataatagccggatccgatttgggataacgaaaacaatcgacaattcccgaataattctccgtcaattccgattcccatccattaacaacgtatgcatccgtcaaattattcattctggccgattctattttacgtccctgatgttcataagacaccgttcccatagccacacataaatcatctacggtaggataaactgtccttagctgtttagcatccagaaattcattaaattcatcataccaacgtaaaaactctctaccatcccatcctttatagctatatttttccaaatcttctttattcttttccaaacgaggaggtgatgataaagccccttcctcaccaaagaatacaatttcacgcttattctttgtatcattataataatcttcagggcctttgtacaaaccttcattccaaacagcaggtcctccggcacgatgataatcataccagccactccaatacactttttcatcgtaaggacgaatatgaattttagcctgatcttctatatcatccccctttgcccaagccgaggtacgaagaatcagccgggaaggatccagtacacgcatatccttcatcgcttgaatttccaatgccaacttttcaggagcagcatttccagattcattcatcatattgtagataaccagacagggatgactgcgatccctctttaccatacggacgaccttttcatgcaaaacagcattcataaacggctgtctcacatccagacggaagccgccaggctcttcaaaatagagcagtcccaactcatcagcataattcattacgtcagtattaccgataaaacgatgaaaattcaacatattcaaccctaactccttagcgatgcgaatttgcctttcagccaattcttccgatgggaaaataccattgaccggccaaaaactccaactgatggccgagcgaagcatgatacgttttccgtttaaacgaaaaacagcatcctcacctataccggaagcctcgaaccaacggaatccaaaacggcgggaatctttatctacccagttctttccttcggataactccacctcacatacatacagattaggatcatccacgctccataatttcgcctccggagctgatataggaatcttcagttcattcatacctttatttaaagaaacaccctttatctctttagaataaactattttttctttattttgccactcgtacaccgttatacgaagatcctgcttcgtagtctttcctttttcattctgtaatgtcagaatagcgttggcggtggttatctgaggagtgttctgcatataaatatccgccacataaacagcattacataccttcataccaacttttcctgttattcctccaaagccatgaccgggaggcaacatcttatctccccacggaatagttctggagtcacgccaatcatggttaccacccgcatccgttatacgtacagccaattgtacttgttctcccgattttatataaggagtaatatccgtttcgaaaggaacattgtccacaatctgataatccactaatctctgattaataaaaatctccgcccgtgaacgtatagagccaaaattcaaaaagactttttgtcctttcttcaacaccggaatatccattgtacgactccaccatgtaactcctgtaatatctccttcgggtccggactgagtttgaagatattcttcagctgttccgggaacctgtaccggaagagtctgggcagaagtcaatatatcccatcccgctgtaggaacagttgcaggaactttctgtgcctcttccaatgtcaaataaatatcctctgtctgccaagctgcatttttatcctgccataaatgccatccttttcctgacaaatcaaaaaacggtctctcctgtgctctcaccccataaaatggacataacaacaaaaatgctatggcaataatactcttcttcataattatctattactttcttttattaaattcaataataactgttggcccactacattagccctgttctcgcttttaatacatgactccatgctctcatagatggtaaaaccaatattctgttatagctaatctcatttattttatttcattcatataactatccggcaaccaccctttcaatacaaaagcaggattccgataattgttaatcatctctgtatctttatcttttgtcaactggcgggaatatggatgacgtttggatacatcaaccggatttcccgtcaccatatcacaagtattatactcgtacattttagcagtcttcgctccaatagaactccagccttcaggaattatatttttcactttacaatctatcaagacaaactctgcatcagggtaggccgaaccgtggttacttttagtacgtccgtaatccgcctgtttaccatcctccgtagaaaaagtgcattcaacaaatacattaccatgattgcctgccgtatttcttacccatgagaaagggccgccaccattacggaaattacttttataagcaaacaagctgccacgtcctaaaatagtatcaccaccaccatccaactcacaagattccatatagattgttccattcgcctgcaatgcatctcctgaacctataatatgtacacggtataaagcaatcctttctccattaatcaacaacccttctgcctgaccttttaaatctgtagcaatggtcatatcctcaatgactatatccttgcaattatcaagcatgaaagccgcccgacgggaaggaaatgtaccgggccactcattggttttcacagtcagcggatgaggattaaagacttcattatttgcataatgtactttagtatcggccattcctgctcctttaattttaacattccatttatttcttgtatagaccaattcttcataatcaccgggattaactaaaatcacagtctgctgttcattaaaatcaggaataaaatccaaggccccctgaactgtattaaagtccccttttcctgtagcatccacaatcaatgtatctgaaagttccggcatgtcagatttagtagtgaaagtccactcatcttctttagtgactccttgaaaactgccgtcagctaaatttaacacaccattatctatagtcacatagtaagtatgcccatattccagcatattattgtgtagataaatagtagctatagaatcacgcacgatgacaggataaaaatgaaaggcatccgtaaatccccctatgatagtaagctggtacacaggaggagtaggttccgccgttcccgaaggagtacccggacgagtatctttattggtaggcacaacggtacgagtatagtcataaggcacttttgtataatcacattccggaccatacgtacggctctccgtaggaccagacggaatactcaaatccaaactgtccaccacttggtcagtaactgcgtcataaacccgtatcataccggaatctcctaggacaggagtctcggaaaaagtaagaaccaaatgagtgtccggattgacattttccgaaccggaagcaggaaaaagtgttgcattgacctgccctgtctgattacacgccattataaaaggaactgcggcaatcatacctaaaaacgattttaatgtaaccatagattcatcagtattaaattcaagtcttaatcattctattcccattccaccttcatataatgcagcatcgttgtactttcaccacaactgcccgtatgctggataccggtgcccccaaaagtgttcgaggctatatccgcctccaaatctaccgaaagtttcaaattcggatcagttacaggcgccggaagcggagtcgttgttgaagcatgtgctgtcaattttcctcctttagcagtcaatgtcagagtacaatttgtacgatagcaggtagaagacaccggttgactgatggcttcagccaccccgttctcatatttcatcaaaataaaatcaaccgcattactatacttggtcgtacgaatgatacgcaatgcatatcccgttaaagtacgggtatcaaacttgatatacaaatccaaatactgtcctgtagcactaccaaaaccttgtcctgctgttttactggcatccacattcaatgtgattgccatatctccatagctgccatccagtggagtatacagcaaacgggctcctttctgatcctgcaacaaaccggttccgtgagaaccattcattccaggtccataaatccaataatccttatccggaactacctgccaatcgtatgctgccgtatccaaaggcttatatccaccaatcgtccaaaatcccggtaaaagttgtggttgattcttacatggaaagttctgaaaatccgtttcaaatatatgagtgatattcacttgccctttctttattggagaattggaaacaacaatccgttcttcccccggcaaacaacgcagatgcttgggagcgatagctgccatcagataataaccaacatcttcttttaccaacgtataggaatattccggttcattcaagcgggatacagaaaccggaagtctatcagtcccgttcctgtccgtacatctataccaggttatcaatgattcatccttacgcccattcaaatttaaagcataactgacagtagctactcctttagcaatattcaattccggctcttccgtaaacgagggagccggtacataatcgggagcaaccgtaagttctgtcgcacattccaaaccatcctctgtataggctatcacagtgaaatgttttgtttcatcctccgtattagttgcctcgacaacacattcataaccctcggaagtagataatttcacatccttttcataaccttgttgtactttccacttcacgggaacattattcagtacatagttgcaatgccttttcaccgtcgcaaccagtctgaccggctggccaccagtctggatggaagccgttaaaggctctacagaaagacaggagggcatccgggtataatcccttccatcccgcttacctatagcaatgacacgatctttcacctgaagaggatcccaatcatcctctcctctcaataaattgtaagtattataaactacctcttcattctcttccagccggaaagttttcagttgattcagctgatccatgcaaaccgtattataaggcttgtcagcccctattacataaggttgcccgttcagcttcacattatattggtaacaacgcaaccaatctgtgggatcatgtgtccagcccgcataaaccggcttcttcgaatgataacggcaatcgacaatacttaacggcccgaccgacttacaaaaatattgccggtcttcctcatgacatacataaaagtcacagttcaaaaatacagctccgcccatatcacttctccaaaaaggtttctgaccataaaaatgaagtgtacaatccagataaacccctgttccggtcaacgcatcatcggtactttccatgtggcatttattaaaaagtatccgcttggcgccattcagcggattcatgttcaagcgactgatgaaatgtacattatccgccacaatcttgtcgccatgacaataagcgacgtgcgcctgagtgatggcagacattcttttcttcctgcttaattccttcttcagagggtattccaaatcgacattacagaaattccccatggtcaagtccttaaccaacagaccgtctccccaaaaatcaaacatggtgaaattaccgacagccccctgtgtctgtccacggctggatgccaggactgtattttcagaatggctattcaatccgataatatgaagataagggcatttaacaaccaagccgaacggttcacgaccgtcttttccaacacgaatagcaggatcgtcaggatcatcaatccaataaacgtatggagccagatagactttcatcggttccgcttccgtaccagctgaaaaattagcggcagctttattgaaactattaaaaacataaggattacccgccacttccctatcggacaactgcccatcaacaaaaaatgttttcggacctaaaataatttctttatctgcataacgaaggcagtttcctttaaattctataggttgcgaaggatctaacgaactataatgatcaatactttgtgcttttaacagatgtccccatacaagccagcacaaggcaaaagcgaggaaatgtaaatgtttcattttgtatagattaagatttgttctactacaaaagtaaacgagagacaggggacagaaaggtaaaaattggtctattatgtgcaaattttgaataatgtgctaatttgccaatttgctaataggccaattgacatgcgaacatagcggaaccaaacggcaaatcagcctattagcaaattaacacattcattaattattttacttcagttatccttagcagcagataaagacttgcaggcagtcttactcttccttgatttttatcatacaccctatcttttacaggagcagtcgtttcaaaaacgacaggccattcggctatcgtcatgttccaagtatcaatgacttccactttaaaacgtactccttctttcaaacgtggataaaaagcgttttttaccggtaaatcaaatatccattccggtcttatttctttgcccagataaatcatataatagttttctccggcagtagaagtatatgggtcccaactactatcgcataaatgcaagggattggggagtgcatccaaaatctgtcttgtaaagccgatgcgcttccaggactccccttgaaaagttcctcctacagccagaaaatcacgggaataatcttttggattatccatataacattctccgtgagttacgtaagtccccacaatcagcccttgccacaagcgataaagatattcctgaccgctcaagcttccccatcggttatccatattgccctcataacatacctcatcaaaaataatcggtttcttataaatattcttcaccgtagccgctcttccaaaaccctctacaggtgcctggtcctgtatgctggcatgggtatattccggttcccaatatttataatacttagctgtataagtatgaatggaacataaatgagaataaggatcattctctactaccgtatgtgtaaaggtatcccaatattccggttttaattctctcaaaaaatcatattcattggccagcgaccaccaaatattgcgaaatgaactcatacgggctgtcagatacttcaaatatcggacaccggcttccaaaggcatcctgtcaaatccccaacggccaccatcataagggtggaaaagaatcaaatcagcctccacccctattccggccaaattatccacacatgcttccacatgagcaaaataagccggattgaagcgggtgaaatcccattcatacacaggctttcccttttcatcctttgttatcttctttatctcaaaaggaaacatggagggttcaggataatccggatcaaagttttgcacaaaaaacagcatcctgatcttattgaacttggacagttccaatgattttacagtctgatcgggttggttaccggccacatgcatccaatcataagaagtcgttccaaccggatagtaacgtgtcccatcagcatatttaaagttataagttccatccactttgactgggccatgatttcctttacccggagcaatacattctatctgaccttttactccatccaatgcagggattttactctgtgttatataataccatcctccttgcttcacaggcatgaaacgaattttaaaagtatcatttccatcataaaacccacgtactgtcaatgtggtatccggcccgttgaacgtcgctgtaagttcaacatcaaaaggattacccttcactttggcaggaatggagatttcataacgtccccaacattccaccttatcctgagcaaatccaccggaaattcccagaaaccatattattaaaagaaagcagcaatatttcataagccattcaatcattaaattccagttaaaacaacgtatcaatcaaggttcctcaaaacaaagtccgtcacttccacctgtccgtcaccaccggcaaaaatacccggacggacaaacaagaaaccatataccgtgttatgatgtacccccgatatttcaaatccccatggatacttatgccattttttaccatcggcactataccaggccgataatacattcgcatcattccgcaaacgcagccacatctttccacattggtttgcttgaggagattttgattccgtacggctgacttgtccacgccggtaacgaagcagctgcttatgattaaaaccaaatccaaaatgataattctcatcataataggctaccaatccggcagatgtattttcacctttcagttcgaaacaagcctccacttcatatttatgagcactggtacgcgccaacaaaggagagccttctttaggagtattcccttttgcatctatactgattttatcaggagtaatccgaaaccggtcatttaaactatgttcccggcacgtctgccatacaaaatcctctataccggatactttcaaacgttccggtgcaggtaaagaaatgactccttctttcaaatgcaaccacccatcttccttctgaaccagttcacgtaaaagggtctgacgccccaatgtctggaatccgttctcataagcatggaaaatcatgaataaccgtccatcttccgtatcaacaatagagccatgccctttactccaccatttttcattacgcgattccgtacgaagaagcggattgaaaggagcattctcccaaggacccattatatttttactacgtgcctgtactaccatgtgactggtggggggacctgccgtacccccttcggccgcgaataaataataatactctcctacttttttcacattcagaccttccatggaaactccttctatatcccattcctccggtatttcccattccttataaatccgaaccggttctcctgtaatagagcatccatcatccgacaacggatataaagcaccggagctgagcaacagatatcgttttccgtcctcaccaaccacatgttccggatcaattccccctattttcaaatcaaccggagcgctccacggaccttccggagtatccgcccaagttaccatattggttttctttcctttctcgtcccgagtagggaaataaatatagaaacgcttgttatggactacaatatccggagcccagatgtctccggtaaaagtagacaagacagtggaacagggagtccagtttatcaagtcatccgactggtaaacgaccagtcccggagtataaataaaagaggaatggaccagataataagattttccataacggacaatagaaggatccgaattatcaccttccaaaatacgtacagtagtttgatcctcatttaaaggatcttgggactgcccccataaagggagcgccccaaagactagcaaaaatgcgcaaacagataaaatgtttttcatatataattcttattcttgtgccaaaccatatccattcgttatcttgcctttagatttgctcaacgtttcgaatggaataggccagtaatatctgggaggaacattaccgtcctttactcccggcaacaaattactattcgtataatgatcagcatatttcaccaatgttgctccccaatcaacctttgcataaccctcgtcaagcagtttctttgcttcagcaccatcgggatctatataattaaacagcccctcaatagctaggttatggtctgttccagtaacttttaccgaagtggtactataatcatattgtcctctccatcctggatacagagctggatccgactcatcaggatcaaaagtcaacggtgaacttaaatgcactttcttagtatatacataattcgagatcacattaccattagcaaattcatggtatccttttgtttgcaaatcatgaaccatatccgtcatttctgcacgaacagctaaagctttttccacaaatttacccgaacgaatcaaatcccagcgacgagtaccttcacctaaaagttctaatttgcgctcctgtaaaatagcttccttcaaaacttcacctgaagctgaaatggcatgatcggaattaccaaaagcgcgttgacggatttggttaagtaattggattgcttctccttccgttcccaattccgctttgacctcagcttgcattaaaataaggtcagcaagcctcaacactggccaattcatccctgaagtacgttgagatgtggtataaggaggatccatacgattctcatcccatttattaatcgcaattcccccatccaacttattacccggagtaaaagacaacaaagcttcattgccatcccccttgctaccggttacagtcacactagcatctctacgcatatcacccgcttcaaactcaccataataaaaagaagggataatacgtaatgccccaaacgacttgcaaggcgcagcttgattactaccaccactggacggacgtccaaaagcataagaatattcactggtagtagtctgcccactttgccccccttgtatattacctacttcaaaaatagattccggactaagagccagatcatgagtatattggaaatgacgctgaaacggattattcgcataactccggtcatcaaccgtaactaaagcagccgttcctttattattcaaagcagcctgaaaatatttctcggcaatcttataataatccagataatcattgcgccgagcatagacacatcccaattcttcttttccttttgtcgtaaactgcacgtcaccatacaagccgggcacatctgtacgaattgtctgatatccaccggaataaagagctatttgtcctaacaacgcttcagcaaatcctttagaaaaacgttctgcagtaatgccaccttctcccagtggatacatcaatgcctctgcctccttcaatatctcaataagattatcataaatttcaaagcgggaagttaatgaataatcttccacattgttattttcatatccataaggtacatcaccataatgttttaccaaatcgaaatagcagaaagccttcattgttaaagcctcaccataaagttgagtccaatcatttacttttcctgcagccacagcatcttgaaatgcagttttaccagctaccaattctgcgactctagatgcacgtgcaatcgtagtataaagcccgttgaagcctgaaccgcccgcatttacacttaacaattctggtaaaagtctggcgttggcattattcaaagaacctatttccggatatatttcagagtctgaaccaataggatcattccaacgataagcccccataatacaattctgccgataattagcataacaccaagacagaattttaaaagtttcagaagtagaagaggttacaaactcatctcctgtgttctccggtgaagaagtattcagataatcactacattgagcaaaagaacagcatagtgccaatgcagatatatatgttactaatttattcataataattaatttaatgatttgtttttttgattagaaagcaagattcaagcctaccacaaacgaacgtgctctaggataagttccccagtccaatcctactgtaggatatttcgccttgttctgagaggtattggcactaacttcaggatccaagcctgagtaaccggtcaaagtaaacaaattgtaaattgttccataaatacgcaatttgctcaaaccagccttatgcaaaactttatcgggcaatgaatatcccaatgtcagtgtgttcaagcgcaaataagaaccatcttcgatagcaatactggaagtaaccccattttcactataaggtaatggcaaattagcatttacattagctgcatttaattgctcaggagtagtgagacgaaccaatttcccatctaccacgtcataaatcttataggagtctttcataaaaccaagtttattctcatatactcccttttctttcgcaccgtataaagaagcgattttattcacattatacacatcattaccataactccagttaaaatacaatcctaaatcaaaatttttataagttgtattgatattgaaaccacctgtatgaacaggattcatatcaccaataatggtaacatctttctcatcaatgccgccactattgtccatatccttaaattttggaagacccggataagcattttgtccggacggacggtccaccccatgtacaggattaataaaagaacctaaatccgccacaccctctttcaatatatattgtccgtttacataattaaaatcatctgtggtataaaagccgtcatatataaaacctctgaccatgcccacaggttttccttcctgcaaaatataatcctcaccagggaaactgctgctgccacaccaactagagccatataaacctgttacattttctgccaatttatcgaccttgcctttattgaaatttatattcataccagccgtgatattccaatctttattttcataaatcacaccagacaaagaaaactcaattcccttattactagtctggccaatgttatcatacgtagaggtgaatccggtaattccgggaagcgaagtcaacatcagcaaatccttcgttgtattccaatataaatccaaagacccccacaaacgattctttaaaaatccgaaatcgaaaccaaggttacgtgtaatagttgtttcccattttagatttttatttgccatctgttccgttgaaagatcgtatgaagatgaatactggttattcaatatatattgatatcgcaaatcagtttcagaagtccaagtttgtgaccataaatcagaactgatgccatcattacctaccgtaccataagacaaacgaactttcagattatccaaccagtctttcgttccttccatgaaagattcttcagaaagacgccatccgaaagcagcggcaggaaaatatccccaacgatgttcgggcgaaaacttagaagaaccatcggcacggaatgtcacagtaaacaaataacggtccatcaatgtataattagcacgaccaaagaatgagagaatacgtccgggaatatctactccagaagagaatttacttgttccatgttccgcatcatattggttaatcatagcaaaagcattgtcctttgtgaaattagatgggaagtgactagctgaaatcgacactttactaccacctgaatctgtaacctcatgacccaacagaatattcaggcgatgctgtttgggtaagaagttaaaatcataactcactgtattcgtccagcgaagcccccagctgtcacgcttcgtatattccacatttcccgcatacagcttagcgcctgtttcgtcatccaaataattattataaatagctcctccccattttttatcttgttcccatgactgatttaaagtaaaatcagtgtgataagcaaagccgtcaaacaatctccaatttaaagacaaagttccacgaagtctttgcttgatatataacggatcataatcaccgatacgggcaaccggactataagtgtcccaagtggactgacgcccatacatttccatatttccttcacgcaaagcattcaaatcccccaagatatcaccggtagcaatcggacgaaaacggtaagaagatgaaagcaatgagccagagccattagttgtcccttcatctcccatagtacgcatatcactataacgggtatccagattaatatccagattatcacgtaacttctgattgaccttcaacgaaatccctccacgcttggcataagagttcagcttcatgccttcctcatccatatagttcatcgcaaacaaaacctttgttttttctgtacctccactaacagacaaatcatggttatgggacacagaactattatacacatctttctggatgttataattcttggtgttacgataactttctatacctcccgtattactaccagaataatcaccgatgccatacaatttttcgaatggcagacgatatgcatcgccactagccgcagcattcgcccaaacaaacgataaataatcataaggatccaatgtttccaaatatttagtcggcgtattaaatttaacataaccattataagaaacagaaactttcccttctttcgctccctttgtagtcacaaggattacaccattggcaccacgtgcaccataaatagcagtagaagacgcatccttcaggacgtcaatgctttccacttgatcggaaggaatatcatttaaagaattcactgttacaccatctaccagaatcagaggttcattactttgcgaaatagagcctcctcctcgcacacggatagaaatagccgcgtcaggacgcccgtcttgtgatgtaatgttcacaccgggaagtttaccctgcatagcctgcgccacattagaaacaggcatgaccgatacagtcttaccactgacagaagcaactgaacctgtcaaatcctttcgtttaattgtttgataaccaattacaactacctcgtcaagcacctcattatcactctccattttaatagcaaacgcatgctggctaccgacttttatgttctgagtcttatatccgatatacgaaataaccaatgtagcatttgcgggaatctccaatacaaacttcccatccaaatccgtaaccgtccctgtagtagttccctgaaccaagactgatactccaatcataggctcacctgtttcatcaataatggttccggtgacccttttcacctgagtaacaagttgagtgccaaagttcctaacatcggcagaaacctcagccatcatcggtgcgacacttatggacattgcggccgacaagctccaaataagaaaagaacggctggctttacaaccgtatgcgcttgcaaacaaacgccttgttttctgaacattttccatactttcctgggttaacaaataatcatttttagatttaatagttccttttgtgttctctttaagtatgtttcataatcatagtatcttaaatcacacattgcaaaagtagaaatattttcggaaaacaaaaattatttcgcattattttcttttttatttaattttgttttacttcgtttcttgtatatataatcacacaaaagaaaacaatcaatacaaatcattaaatatatatactatatatctctcaatcaaacaacatttgagggaagagtgtactttcgtttcctttcagccaagctaaattaaacttataataaaagcggcttgttatcagatgaatcatgttatcaggtgtttgtgttccggccaagtagccacgaggctcagcatgattctcatccatttcaaaaaactgggtccaagccccaccattaagaaaacgataaataccatcagtcaacaagcgttttacaggccaggtcttaccttcatcgtatgacaaagcagcatacatgccatatcctttaaaaggctttcctgattgatcagtaaacatcattccacgctcctctttcggagtacgataaggatgctcagtaaaagaaatcagcaaaataggaccttcattcaaacgcatcaataccagccgttgtcctccatcaatgggtggaaattccgaagcggaataatgccaggtcttgcccatatcatcagatacactcataggcatacgtagacgtccttctttatcacgaatactattgttacgtcccaatgccatcaatctgccatccttcaattgcaccactccggcatggattccggcaatagtggtacctgtccctccctctttaaaatcaggcaagggcgctccatcccacgggtccgtccaagtttttcccttatccttactgatatgaacagcagccccgtctcttccaccgggtccggcatcacaagcctgaacaaaccagccttcctttgtaatagaggttccggctatcacttgatggcgtctcgtatgctctggagcaatcatacgaggtttactccaagtttgtccattatctgtacttgtacgcaaagtcatcatcaaattctgccaatgtccggccgcttccactccattgatatggtaaagagtcccttggcggtcgttcaacaatgcagttccggtcaaattacgatcagctatctgataaaacatacgaggcttttcccattcacggcttccggcacgcaagcgcgaagagagcaccaccatctcacggcctttttcttcattggtagaaaaccacacagccaacaagtctccattatcacaccaagtcaatgccggctgatgattatgcttgaaaaaaggcgttccactatgcgcatccggttcatgcacataaaccaaaggagcagtgaagactggttccgtgacacattgagaggcccaattccattttatctgagacacgacatactcatcttttggctgagaaagcggagcggtctgcggatactctgcctgtaccacccgaaagcctgtcattgcatgtttgtcctccggcaacatagccatacgatttgccgaacggagatatttcaccggtgtattatgactccctcctctggtcacccgtgccataccgtccgaatagccgacagggtcagtctgttccttgtctatatagggcccataccagtccagacaccattcctccacatttccgcacatatcatatagcccccattcgttaggaggagtttgtgccactttcaaagacaagggtttgggagtagccgctatcacttgattcttttgccaagcggcaggaagcttgtcatccatatagaaattccagtaacggcctgccttacatgcatattcccattcagcttcggtaggcagacgataagtttttccttctttccgggtcaaccagtcacaaaaggcaacggcatcttgataagttacgaacaccaccgcttcgtcatcttcatttgagaaaccatttttaccacgcaacaacttgtgtccgggacagaacaattcatattgcgcattagtcacttcggtcagtcccattttaaacggtttagatatgtgcaccttatgcataggtgcttcatcataattttcatcttcacccaaagtccccatatagaaatttcccgcaggtatttctatcattggaatcaattcactttgtgccataatacttgccggccatatcatgatgctaactattgtacttactaaaaacttcaatttcatttcgtatctgattaaaatatgtcttgatacaaaagtaacaggctatcaaagaagaacaaggtaaaaattggtcttttatgtgcacaattttgcaacaggcgaacaaacctatcacaaaaaagatttctacctttcttattgtaacttcctacaacaaactgctgccctctacatctacctatccataggtgattcggtaaaatggtgacagctatggtagcagaaattacaagctttaagaaagcaaaccttaagttcaaattgtcaatgcgataataacaggaatgcctgtttagaaatacattcttaagaaacacaaaaaaggagagagcattcacaatacgccctctccccatacatttattttcgtttaacgaatgaattattattcctgtttaaagccataaccattcgtaaagccaccggctgccattacattaggagtaaacggccacaaatagataggagccgaaacgtaatcataatcccaaaacagatacttatcatattcatctctattatcaaccaaatcaataccccaattaactttggtatatccttggctttcaagagatgccgcctcttcttcagacactatttcaaacaacccttttattgctaaattggtagctggagtcgaacttccataattcaatcccatttcttcccaattatccttttgtccgcgccatcccggataaagcaccggatcattgaccttgtctgtcggacactgtgctgtcaaacgatgaccatatatagtttttgcatcaactaattttgtccatatataagcagaaatgatattaccattttcaaactcataataacctttagttgccaaaccatccatcatagctttagtcatatctttgattctttttatatcttccggaagataaccagaacgaatcaatgtccaacgacgatcaccttcacctgcatattcaaacccccgttcttcaataatcgcacgaactaagtcattaccaaaagatgcaataaaagcatctgtgttagccaaaccttgcgggaacgaacgttcacgaaccgtttttaaatattgtttacctgtaaccacatcacctaatgccgcacatacttccgcatagcccaaataaacttcagacatacgcatatacggaccattgatacctgatttacgctgtgcagccacccatggattagcctgacggttctcatcccatttattcaatgtcaagccaccgccttcagcttttgagttggggacaaaaggaatcaacttctcaacccctttaccattactgccggtcatagtaatgctcacgtcacgacgcatatcattcggatcaaagattccataaaaataagcaggatttatacgtccctgtccatagctcttacatggatacgctgcctttgagccaccagatgaaggacggccgaaagaataggggcgaccatcatttccaccaccttgctgcatgggatattcataaatagactcatccgcataaatagcatcatccatatgcatctgttcaaagaaatactggtaaggattattgaaagtacgtccggatttatccgaggcaccccgtggatcagtcaaatgaaactgtgcattacccggatcagccaacaaagcctcatagtattttttagctatcgtgtacaagttctgccaatcagaacgacgtccgtaagtagctccattattttcttttcccttgttttcaaatgtcatgctttccccttttccatttacacgtttaatatcgccacgacgggtctgatatccagctgcatccaaacacattcttccaatcaaagcctgcacataggttttagaaaaataatttttattggcagcagcaatgccgggaatggaaccgatggtgtacatcaaaggttccactttctgcaaatcttcaatacatacatcataaatagaatcacgggaaaccaaacctttaggcacaacaccataaacacctacgtatggtacgtccccgaagttcttgcacagttcacgataagccgtagcacgcatagctatcgcctcaccatacatttgccccatctctgattgtccaccattgatgatcgattcaaaattcgatgcgttttccatggatgttatcaccgcattggctttgctcacaaccgaatacaagctagcataaatatcattctccttcaaatatgaagtcaatccatagctacctgcataagtaccgttttgataaagacattccggatagtgacgtcccagctggttagagaaagactccgggtgacgttctatatcagacccggcaatatcagcagcataaaacaatccatcgccaaaaaccttattctgcgcacaatccctccactgttcataagcaccgtctaatgccgcacgtgctgttgtcggattagaaaagacaaaatccgaatctacaatagaaggagagccaacctccaaataatcactacatgctgtagtcaaaaacattccagcaaagaaaagtgttgaatatactatttttttcatacgattcatctccattaattagaaagttaaattaacaccaaaggtataagttctagccttaggataagactggtaatcaaaataaggtgtagggaagccatccttaccatcggtcttcgtgttgacatccggatctataccagagtatccgtcaatacagaacaagttgcttcctgtaaaatacacacgtgcattctgcaatccaatcttattcatccaatttttcgggaaagtataacctactgtcaatgtattcagacgcaaataagacgcatcttcaataaacttagaacttacgattccatattcagagaagaaagaactgtagtttgtattcgcattaagagccgccaaagctgtaggatctttcaccagcatcaagtcaccatttgcatcaacatcataatatttgaaagtttcagaaacaaacttcaaacggttctgaccagcggaattgtctttatttcccatcaatgagtgcattgcattggcattgtacacatcgccaccaatctgataagtaaagcctacagaaaaatcgattgccttccaattaccgttaattgtaaaaccacctgtatgctgtggcatagccttaccgataatcgttttgtcatcctcgtccacaacaccatcacctgttgtatctgcaaatttaggcatacccggtatagcagtttgtccatccgctgccaatcctttaactccatccggataattcacaataccttgaatatcaggaacacccggtttcaatgtgtatttaccatctgcataagtaaaatcatcaatcatataatatccttctgatttaaaaccttggatcgtacctacaggctgaccttcacggataatataatcataagcaggcttagccatagatgaaccccaatcattcatagctctcgtatccgccaagactccgtccatcagttcatcaatattattcttgttataattataagtcaagtttacacctaaattaaaatctttaccacgaacaatgtcaaagcctaaagccaattcaattcccttatttgaagttttacctacattctggaactgatagctataaccggatgctgcgtcgataggcactttcattaagatattctttgtcgtattccaataataatccaagctaccgcgaacccagttattaaagaaaccaaaatcaacacctaagttacgactgatagtagtttcccatttcaagtcaggatttcccttcatgtcacccggtacataagtggttactttttcaccatccactgttatctgtttggtcttccaggtctctctccataaagaagcatcaatattatcagagccagaagtaccatacgatacacgaagtttcagattatccaaccagtctcttgtgttttccatgaaagcttcatctgaaattctccacgctgccgctgctgccgggaaatatccccactgatgactaggtgcaaatttagaagaaccatcggcacggaatgtagcagtcaaaagatacttgcctttataagaataattagcacggccaaaccatgacaaagtatggttaggagtacctatctcacctttaaaataatcttgtcccaatgaaggagtagtcatattaatcataccaaacgcatcatccatagtaaatcctttaggataccctacaccatagatttcagtataatccgattttgatgccaagacttcattaccaaccaagaaagacaaactatgatcatctccaagcccctgtacttcgtaattcaaagtagttgcccaacgcacaccgtaaccatcacttttcttcaatttagcagaactattatctttttctgtctgtcctgcattccatgtcttttcttggttccaattacgatttaacgatagctccgtctttgccgtcaaacctttaataacattccaagttaaagcaccttttgcacggatacggtacatgttttttatataatctacagtattcaagtaatacaaaggattactagtttcttccatatttgtatcaccttgaccaaatccagcagtaaaagaagcatcacccaaaggattatccacaggacgataagtgtaagcagaggttgcattaccaaaaccagatccatttacttctatttcactataacgcaagtcaaaatccgcagttaactttttattaatcttttgcgtcaatttgaaattcgcattccaacgctggaaaccagacttcacacggataccttcatcatccatatagttcactgatgaataaaacttagttttatctgtaccaccagataaagatacatcatgattccaagatgacgcagtctgcatcaaatcatttatataattatgagtggtcatatttttatattcattcaaatgatttccgtacttggatcctaatccaaaatatctggcaactccatcaccataagaatctcccagactcttcatatatgcccatgtattatacacatagtcataaggatccatagtctccaataatttcggattctccttcatctgataatacatattatacttgacagagacccggccatccttgccgccctttgtagtaaccaatattacaccgttagcaccacgagcaccataaatagccgtagaagcagcatcctttaacacatcaatactttcgatattgtcagcaggaatatcatcaatgccactaacttgaacaccatctacaataaacaagggatcattagactgagtgatagaaccacctccacgaatgcggatagacatacctgcacccggacgaccgtcttgtgaagtcacactcacaccgggcaattgtccttgtaaagcctgtgcaacattggcaaccggattagccgctaatttttcaccggtaacagaagcgacagaccctgtcaaatcacgtctttttactgtaccataaccaataacaacgacttcatccaaagtcttgttatcttcttccaatacaataaccaagtcttttccggttttcacctctttagtaagatacccgatataggaaaccaccaaagtagcgttactcggaacatccggaattgaaaacttaccatcgaaatctgtgattgtaccattggttgttccttttaccagtacattcacaccaatcataggttcgcctgttttgtctttcaccaaacctgttgcggtttgggcaaaagcaaccaaacaaagcatactcaaaaagagagttgagacagcttttctagctaattcttttagattcataagatgtgtttttatagttattaaaatgtttttttaaggttttgaccttagtttcaccgttgcaaaattaagaatataacattaccttcatgtgtagtttttatctttttatgtggatttattaggcatttttcacgacttccaattattcaacacaacaaaaagaggagacctccaccaacgtagaagtctcctcttcaagcaattataaattcaatctagtctattgggttccaattactttgagtaccaaaaatagcatcgaccgtcaccgcctccgcttctttctttgtcagctgtttgctccacgctaccctttctgaaacatttgcgccctcaccggtatttttatattccatataacgggctgtttcttcattggactgcttgccccaattgtgccatccggcaggaacaatatgcttgcccaactcacattctataaataaggtataagcgtatggacgccaaggacgacctaaatacactttatccactcccggttctgccgtcagcttacagtgtttgaaaatatatccatatttagcttctttcggagtggaagcagccgttacatacgaattgcgtttgctgtggatcatacaattttcaaacaaagcggtggaaggaccgaaaataaagtctgtagtaccatcgatataacaatccttaaaataaaggcgggtaaatttagcaccggtataaatagtatcctgattacccaaaatacggcaattgataaatttcaaacggtcaccttccgtatgcagagccaccgcctgtcccaactgagccgcattattctcaatagtcagattcttaaaagtgatgtcactgccctccactttcaccgtataagtgcggaaagtacccattttatttatattcgcatgatcatcataagttataatcgtcttatcacgatcttcacctatgatatctatattttccacccatgaaggaacaatcactttctccttgtatactccgttcttcacatagatcgtaacagtataatccatgaaagcccgagcactttccacagcctcctgcaaagtacggaaatcccccgttccatcgcgtgaaacaacaagggtatcccggcgttcctgagcccatgttccgctaacagcgactaacaacagcaataatcctaaaacttttctcatcatctcacctcctgttatttacatgcagttccacaactgcttttctgaaacaaacgctcccattccagactggccataatgaacgggcctaccgccttcgcgtcattagaacgtattttttcagttatataataattataatctccggtacgatacaccggcttgcctcccaaaccggcaacggcacaccctttagtgatagaaaccacacctttattgtccacttctatgaattgggtcagaagcccttcataccctttcttggccacttccatgtacgaaggacagatataccccttacgcaacgccttcaacagggtgtatacaaacatggtagaacaagaggattccagataattcccttcatccccgcttctgtcaatcacctgataccagactcctgttgcaggatcctgggtacgtttaatctgggcagccagtttattcaatatttcgataaccgactcacgtccggcttcgtgttccggtataaagtcgagcacatccacacaagccatcgcgtaccatcccatggcacgtccccagcaatgctgtgaccatccggtagtcttgtccgcccacttttcacgcttgctcacatcacatgcatgacggtataaatcagtcttcggatcataattatggcgggccactgtgacgaactgattgataatatcagcataatcattcacacggttgttacggtaagcatactccgcatagaacggttgtcccatataaagcccgtccagccacatctggttctcataaatcttcttgtgccagaaaccgccatcggcgttacggggatgcgtatccaattgactgcgcaataaatccaatgcttttttgtatttctcgtccttagtctgctcgtaaatacggaaaagcatcttgccggaattcagacggtcaatgttatattcctccagtttataagtttcgatagaaccatcctgatgaatcatcgtatcggcataagccacagcataatcaaaaaactttttatcaccgtatgcatcatatacatccagcatagcttgaagttccaggccatgacagtaatcccacttcaaacgggtctgaaaatccaattgccaagattcgggacaacgcaccatttctgattccgccatacgtacagaccaaggcttattaccacaaacctgctgagccatgcccatcaaaggaacaaccgcaagcaaaccggacacaataattttacaaatagaattctttttcatgaagacatttatttttagtattagacctatttattttatgaaacaaaagtagtattttcctcgaaaagcagtgtgcacttttcaacctactaagtgtattatttggtattcgtgtgcgaaaacggttatttttgtgcacgataacgataaaaatcgttcaaaaattgtctttttactaattattatgtctttcaggtttgataagttgagaaaaggttttatttttggggcagtttttaatttatactattgtagaaaacacagtcatttactattaattcacaagagaatggaacaagtttttagttatatcatcggtttaggagcagcggtgatgatgcctataatttttacaatcttaggcgtttgtatcggaatcaaattcagcaaagcattaaaaagcggtttgttggtaggtgttggtttcgttggtctatcagtggttaccgcacttctgaccagcagtctgggtccggccttaagcaaagtggtcgaaatatatggcctgcaactgaaagtattcgatatgggatggcctgctgctgcagccgtagcttataacacttccgtaggggcattcattattccggtatgtctggccgttaacatcttaatgttattgactaaaaccacccgtacggttaacattgatttatggaactattggcattttgcttttatcggagccgtagtttattttgcaacagatagtattttgtggggattcttcgcagctgttatctgttatatcatcacattaatcttagcagattacacagcagacaaatttcaaggtttctatgataaaatggaaggtatttctattccgcagcccttctgtgcaggtttcgtaccattcgctctcattataaataaggtattggacaaaattcccggatttgaaaagctgaacattgatgcggaaggtatgaaaaagaaattcggtttattaggcgaacctctcttcttgggtatcctggtaggatgtggcatcggtgcattatcttgcaagaacggacaagaaatagtagacaagattccttatattctaggtttaggtatcaagatgggagcggtaatggagttgattccccgtattaccagcctgttcatcgaagggttgaaacccatttcggacgctacccgcgaactgatcgccaagaagtttaagggtgctgtaggcttaaatatcggtatgagtcctgccttggtgatcggacatccggccacgttggttgtatcattactattaatccctgttactatcttattggcagtggtgcttccgggcaatgaattcttaccattggcttcattagctggcatgttctatgtattcccattgatattacctatcacaaaaggaaatgtagtaaagactttcatcattggttttgttgtgctggccatcggtctgtattttgtaacagatctggctccttatttcaccaaagcagcacatgatgtatacgccaagacacaagatgctgccgtaaacatcccgtctggttttgaaggtggtgcgttggattttgcttcaagtcctttctcatgggctattttccatttgacttattcattcaaatggattggttccggaattttagtactgataacactattcttaatggtgctgaaccgtcgttccatcattaaataccagaaaacaatgaaaaattaaaaattaaagataatgattatgaaaaaattagcgattgcaatgatgctgagtgtttctgccttggcaacttcagctcaagtaaattacaaagtacagaccgcttgccatccgcaagatgtgaaacactatgatacagaacgtctgcgtagttcatttatgatggaaaaggtgatggcgccggatgaaatcaatgttacatacaccctttacgaccgtcttatttacggaggagctatgccggtaaacaaaattttgaagctggaaactttccgtgaactgggtccggaaatcacttacttccttgaacggcgtgaactaggagtcatcaatgtaggcggtgatggcgtagttactgtagacggtaaagaatatcctatgaaatacaaggaagccctctatgtaggttgcgggaataaagaagttacttttaaaagtaatgacgctgccaaaccggctaaattctatatcaattcggcaccggcttacaagccatacgttactcaattgatcactaccgacgccaagcttcaaaaagcaaatcctaaacagtatgctttagctatctcagatcattatggaaaaatggaagatagcaacgaccgtattgtaaatcagttaattgtaaaagatgtattggaaagagtgaaaaacggcggtacaaaccaattacagatgggacttactgaactggctccgggttctgtatggaacaccatgccggcccatacacatacccgtcgtatggaagcctacttctatttcaacctgcctgaaggaaatgccatttgccacctgatgggcgaaccgcaagaagagcgtctggtatggttacacaatgaacaagccatcacttctcccgaatggtctatccatgccgctgcaggtaccagcaactatacctttatttggggtatgggaggtgaaaacctgaaatacagtgacaaggatgaaataaaatacacagatatgagataagtagaatggtacacaccattactcattaactcttgtcattctgaatgttgcaagaaatcaactcgttttcagttttttttgcgacattcagaatgatttttttagaaatcttaccattgtaccgatttatacaggctttccaccaatttttgcatagagaataggtacagaatggttatttttgcgtctaataagaaaaacataattaaatctattatcatgagtacatttcaaaaagtaggtgagaagatgacaaacttcagatggataatctgtggtctgctattctttgccactacagtcaattacctcgaccgtcaggtgctttcactaacctggaaagacttcattgctccggaatttcactggacggattcgaattacggagatatcacagctattttctctatagtgtatgccattgccaacctgttcgccggtcgtttcattgactggatgggaactaaaaaaggttatctctgggctatctttgtctggtccttaggagcttgtcttcatgcattgtgcggttgggcaaccgaagaaacattaggtattcataacgcagaagagatgctttctgcaacaggagccgtcgcttcaactatcgccattaccagcgtttattactttatcgctgcccgaatcgtattaggtgtaggtgaggcaggaaacttcccagcagctattaaggtaacagccgaatattttccgaaaaaggaccgtgcatattccacttccatctttaatgcaggttctacagtaggtgctttagccgctccgatcactatccctcctttggcacgttatttccaaagtattggtgtgggcaacggatgggaaatggctttcatcgttatcggtggtttaggattcatttggatgggactttggatgttcctctataagaaacccaatgtcaaccctcgcgtgaatgctgccgaactggaatatattgaacaagacaacaacaatcctgaagaatcagcagaacaacaagctgctgccaacgacttcgacaacaagaagatttcattcttgcaatgtttcaaatttccccaaacatgggctgtatttgtcggtaagttcatgactgatggcgtatggtggttcttcctgttctggactccggcatatatttcggatgtatacggtttcgcttcagatacgggtaccgcacaaatgttgattttcgtattatatgctattaccatgttatctatttatggtggtaagttacctactattatcattaataaaacaggtaagaatccatatgcagcccgtatgcaggctatgcttatctttgccttgttcccactgctggcattgtttgcccaacctttaggcaattattcatattggtatcctatcattattatcggtattgcaggtgcggcacaccaatcatggtctgccaatatttattctgtagtaggtgatatgttccccaaaagcaccatcgctactatcgtaggtattggtggtatggcaggtggtataggttcattctgtattaatatgggatctggcagactgtttgactatgcagcagaaacgaatatgacttttatgggattcgaaggaaaacctgccggctacttcatcatattctgtgtatgtgccgtagcttatttggttggttggattatcatgaaagcattggtccccaaatacaaaccggttgatgcctaattaaagaattcaccacagactacacacctaagtagcctgtggtatttttttccctaataaatagttttcagaagatattgatagatagaattatgacttaatatttcagggactcctgtgataaaaagctgcttgcgtgcacgcgttaaagcgacattcagcttacggtcaatctgtacaccgtcctcttctgtcaggttgggcagaaaccttaattgatagaggtgattcacacaaaaagaataaataatgacatcacgttcgctgccctgataccgttccacagtgtcaatggaaatcctactcaaagcaggaatagccaatgcctgaagctctttacgtatcaaagcaatctgacttcgataaggagtaatgacccctaacgttcgattcggatcaaattcctcttcatgagccagatacacctctttggctaaaccggcgacaatctgtgcctcatatctgtttgtttttccggaaacgctctccaaatcttgcttcgaagggataaaacgtaccggagcctctatgtgctccaactgatgaggtaatcccaaagcctccaattttccggcataaaatgctttattgggaaaaaaagccactcccggatgcatacgcccctgacggcaaagcatatctatcgctttaggagattcttcttttaaatgaaaacgataaagccgctcaaacagagaatcttttaaattaaaaagtccggcttccctaagtccctcatcatgcacttcagaatgtccgctattctgcaaaataacggcaggcaactgtttatgatcacctatcaggataaatttacccactgcatttctttcatcggcaaacttggcacacagaatacccaacaattggggttctaatatttgggtggcttcatccactatggctacatcaaaacgttttaatttaaaaagttcagctttagccgcaatagaggccacggttccaacatatactctgcaatctgccatacggatattcacctctctcctactgttgcattccgccaatatattctccaacagatgtcctctaaagcgtacatcacaggaaagctcacttcccacccgtatataatctatacagggggtgatagaggacagtgactgacaaatttcatcaacagcccggttggtataagccagtaacaatatctgcatagatgatgctgcatagaaatgttccaccattctacgcaacgccctcgaagtctttcctgttccgggaggtcccaccagaagaaaataatcacgggccgactcagctttcaacgccaccctctcaaaatcatcaccggtcagcgctatagcttcatcaaaagacgaatcaaagcggggaggccgttgtcccagcaataattcccgtctttccgtattcgcatccagaaaagcggagagtcccaaatacatactgcgaaatgtagtatccatcgtatcatgttctacagcataacgactgtccggagaaaaaacggaagcattacgttgggtagcacgtaaacgaatacgcaattctgtatctgtaatctgctcaatattacccttaaaaaccattttattggtcgcattatccaagtcattattacgctcatacaacacaaccacatctcctgtacggaaattgggaagaaacatctcatcatattgcggaatagacaaaagtatataagccttatgagcctgtgatgccctattttccattatctgcaaatcatataatatctctcccgcctcacgtttctcatccagtgtactcagccaaagagctgaagcccctgcacgtccttcataatccacatctcccgatttggaggtataaagttcttttgtaatgaaattataaagcgtataaaaataggcctgctccaaaggttccaacgccgacagcttctcccggaaacgcgagatagagggcttcaaatactgttcccagaatctgccgctcagttttctttcattcaccacctccggattgatttgtgccaacaagttgcgtgtaaaatcaggatgattatggaattgtaccccatactcggcagcaacaatacggttacgcaaattgataatccgccttacctgagcccacgatgctctggccggatacaataaaggataacgggtataaagcaaatagggatgcatacgccgccggtcctgtcccatgctatattccaacactgccatatatagcagcatctgaaccttattattttccttgggttccacttttccctgcatggagaattcatccgctttgcccgatttcatttctataaagctgctcatatcccgctgcatatagtccagacgtccctgaatgcccaacgcctcgcaaatataggacggttccagcacagcctcctttttatccagattataccccggctccaaaaaagtgtgttgtacaacgtcccgtatatgctcaaaatgcatccggcaatccttggcaaactctttctctttggacgggtcacgaagttcggcacaagcagccagttcaatgggatactgccggaatgccttcttcatacagtctatatagtccggctcctcctcacctgcatgtatccattcatccaggaacagattggctatatttcccaatagcaaagggcgggcattatcaatcggcaccagccggctcaaaaaatagtttgccggatggctgccataatccttgtaacattccgccaatgaactgatatctatcaaataatccggttccaatacgataaaagaaggggtataaattccatccctatctacagaaacatccagcagattaagctgggcatatcgccaaagttcctttatggtttcttcaaattcatgattgataccgggtttattataaacaacccgtataggttcatcagctattacatctacaggatgtacatacaaataggtatcatcggcataatcaaagcatacacggatgcggcggatgtattccatcttttcttttttccctgaagatgctatttcctgcttgggaagaactgagaacaacttcaatggaatatcctgtgcaaacatcttcctatatgcgtatgccactgcacgcaaatcacgcaggaactcttcttttacaggagacttacgatggttcaaaatatcattggaagtcaggcgaaaggtatgtaactgattctgttctttcagatccagcccatattgagtggctacataattaatacgggcggccaaatcagtggtctgcaaactattcccttgtatcttttcacgcaccacacgctccaatgattcacgcaattgcctgtaacggcgttccaatggctggttttcatctatataaagcctgtataactcttcgtaatactcttctatctcttcattcatgccgtaaagatacacaaattattatttatagaataccggcataataataggatggggttcccatttacgggtcatcggattaaattccctctctgctcccgcttcaattccgaaactatccgatattttaaattccaaagtgcctccgtatgaattctggttcataaaaagctgtgaggcgggagtcataccatatccgttatacaccgagtatgtgccgaacatattgatcttcattctgtcattaatgcgaaaagacagctttcccttagcacctaaatcattaaagcggactccatatacattgtatttagcagcatatactcctcctgtcacggttataaaatcattgagacgctgtgtgtacatcactccggcattacgtgcctcacctatagaaggcaacccttgaaaagaatgataaccactcagaatccccgtactattaatctgataagcacgtccatctatataatcatgtccgaaaggatttccggaaaaaatataaggggatatcttaggcatttcttcacggggagtaaaatcaaattttggcatccgcaacgtatcagataaaacaggaggtgtcaacgtaggaggttcgtttataaaatccatacttttatcagcctcattcatctcattgataaactcattgattttatcttgccggatgatgagcgtatccttgtcattttcaacctgagctatgccatgcaaggaaagaatacaaaagaataagaacaagccaatgcgtttcatttgtaaatatgttttttcaaaattacaatttccgcattgacttttcccgtttcattaagacttaataagactttttggctgtattccttaaaaatgctattgatttaccataggaagttccagccattcggtagaaatataattcttgcttgaatctatagcaattaatacctggtcattatcccgattataactgccgtcataggtaaagggagtaattttactatcaaattctcctataaaagaaagttttccatctttaggactataccaccatactttcttttttgcgccactgattttagtcaagtcaacagacatcggatttccggagtaattgtatactaacaaataatcctttccgcgagtcgcaatggctctgtcataacgattcccattcgtaccggcaattacactttgatccggtacacgttcaaaataagggaaagttaacatcagattcttcagatatttcatctgattgaagccgggatcctgcattgctttataccaaggtttctctattccatcagctccatacccaccgggtgtacccggtttcaagaactgcatgatattattatgtccgtatgtatgtccgcaagagcccgcaaaaacagaccaatatccatagcgtctcacatcacagtcacgccagcgtggctgggcaggatcatgcaatccctgaggaataccttcatagctgggttctgcatccagaacaggcttcagtggagtcatggacaaagcctcttctacataacgccaattgtcttcctccaatcccgtaacagaagtatcaccatctccttttttctgaccataacgcctgtgtccactttggaacatattcatatccatccactccttattattcagatgggtagcactggatgtacgaccaaacggatgaaaggtcattatatgattctcgtccacagcaagaatactattcgccaacgcctcccaaatctcagtattccggtcagcataagtatctccaccgattacccaaataatattaggggcatctttatatcgttcacctaaaaatctaccatacgctttggcctcttcaacattcatctttccggagcgcacaagccctccccagatacataccatcgctatgtaaatgccgttctgctcagctttctgaataatataatccatgtggtcccaatacccgtaaactccttttctgtctatattcttaaaattgaaaccatctatcatggaatactggccatagaaattcatggcaggaactccatttatagtctgtacctgcaccacattgaaacctgcctgacgacaatgttccagataataagcagcctcatctctattcagtttctcgggtaacagccatcccgtatcccccaaccagaaaaagggagtcccgtccgcattcatcagatagcggttctctttacttactttcagttgtccatgactccaaggcttataaaccgacgatttgctctgtgctgctgccgaaagcagtcctccttccaccatcagaagaaggaataataatactagattcttgtttttcatttgtgcattcatcttataaatttcaaaagcccaaagtaacttattcaagcagacaattctgggtaataactagtctttttgagggaatcttttagcttcctccgctttcaggttgagcaaaactgattcgggaacttttatgatagtaccatgtttatgtccttgcggaatagaaatctgatcgtcaatgggagtaaagttcttgaagtcttttgtagacacggctccaaaccgtccttcccgataaacatcaaaataaatcaaccattcatcacctactttcacggcacacggaccttcagagtaagtcggtgcaaattttactgacggatcagcataaggtccttctgccgatggcccggatacacagaacaaatcactgtaaccaggcttgcgattgtcttttataattaatacatagtcgtttttatcacgctttactataaatccgtcaatagaattaaatcccggatcataaaacgcctttgcaggagtaaacgtttggaaatccttggtcgtggtataataggcacggtgacttttattagctcccaagctatcggctgccgtatatctttctacaggaatggcagaagaccaggcaacgatgaactgttccttttcatcatcatagaaaacttccggtgcccacacattgttagtcaaagagtctttcatcactttgatttcgcgttgttcactccaatgaatcaagtctttagaactggcataaccaaatccctgttctccattccaactgattgtccacactaaatggaaagttccatccgggccttgggtcatggacggatcacgcatcatcgaattgggagcatatttctgttcttcggtctgtttagtgaaataattataataaggagtcttatttcctatttccggtttcaaccatgaacctgcgatactatcccaatgatagccgtcatagctgtaaagataatgtaacccgtccaatgccggctcacgatgagaagtgaagatatagacttccttttcgggttttgtacaagctgtaaaagccaataaggcaaaaacgaaggaaaaaaacaatttcatagcatgctgttttatgatgaataaaccttttccaacaggacgaaacaacaagtattttgtactctatacttcttaaagtatcaatccaaatcaataataaatatccatcatataacaagatgtatctcgagacataaaatacgaattatatcccgagacaatcctacatagaataatgatgagaatcagcctttagtttccaaataaaccagctgcgtctgtaaatactcttccagcccatgtttaccatccgcgccgccgataccagatttacgccatccggcatggaatccctgcatcgcctcaaaattctcacgattcacataagtttcaccaaatttcaacgcacgaatcaatttgaatgtcatatccaggttctgggtataaatagaagaagtcagcccatattcacaatcattagcccaggcaatggcgtcttccacctctgtaaactcaacaaccggaagtaccggtccaaaagtttcttcctgaataatatccatcttttgggtacaattagtcaaaatcgtcggttcaaagaaatatcctttagtaccgatacgatgaccaccgcatagcaactcggctccctgctcaatagcttttttcactttctcttctactgatttcagtgcattggcatcaatcaacggacccatatcgaggtctgtatactgattcggatcacccactttcacctgcttgaatcctgccaacagtttttcaaggaaagcctcttttatactagaatgtacatacacgcgctcacagcaattacatacctgtcctgtattaataacacgcgaagcaataatggattttacagctaaatccaaatctgcatccggcattacaataccgggagccttccctcccaattccaaagaaaccttcgtcacattggcagaagcggctgccatagtctgtattccagcctccacacttccggtcagactaaccatacctactttagggttagcagccaattcatgtccaatcaccgaaccacgaccgttcaccagattgaatacacctttaggcaacccaacttcatctacaatctgtgcgaaaacatacgcgttttccggtgtcagctgactcggctttaccacaattgtattccccgtcaacagagcaggagcggccttacgggcaatcaagaaaaaaggaaaattccaaggcaggatgcctgttgtcaccccaataggtttcttaaagacaaatatattttcgtgaggacggtcactaggaatgatttccccttcatagcgacgggcccatccggccatataatcaaggtaatcagccgtaaataacacctctacattagctaatcctcttgtttttccaccctcccggataataatatcagtcaattcctgttcccgcttgcggataccttgtgcaatccgagttaaatagccggcacgttcaatagaggtaagactctcccaagaaagctgtgccttcacggcagcatttatagcagcacgtgcatcttccggtgtgccatcaggcattttagatatcacttcttccgtagaagggttcaatacatcaatccacttatcggattggttttcgatgaatcgcccatcgatgtacatctttagttctttcatggccttaaatgtaaaatgagtacttatttctttcaatctgaaatattcaagcagcattttacaaatatatcgttatttataaagccccaaaatgtatttttgttcattaacatggaaatttatacactttaattgaactttatgaatcatatttataattattcctccatcaactgccacaaaagctatctccttcttatcactaaaacatcacttattatattgtgtaggcaacaccccaaacagtttcttgaatgattttgtgaaataactaggtgtattaaaaccaacctgatcagctatctcagcaatggtaagccctccctctttcaataattcggcagctttacgaagacgtacattcttcacaaaatcagaaggcgagcttccggtgatagatgtaatcttccggtaaagagtagcacgactcatgcacatatccctacttaaatcttctatggaatattcaggattactaaggttcttctcaaccatatccaatgccttctttattaattgctcatcagatgctgaaatagaattcgcttctacttttccttcttccgacaatggatctatctcatgcctttgctccggattttgttccagtggcagaacagtctgtgcaaccatggactcccgtaatttcagatacatccggtccaatccccaaacaaccgataaaacaacaagcacataaaacaaatacgcccaacctgtttcataccaagcaggcaaacactggatcatgaccgttaatgtactcttactccacagcccattctcatctgtagcacggacttccagttcaaattccccctttgacaaatctgacaatccgatactattttcccctgccggcaaggccacccaattatcgtttctttgtttataacgataagcatatcttaccttatccgtattcaaatggtcaaaagtagaaaaaaacaatttcacatttctctcatgaggaaacaggcttattctctcttgattacccaccccgatttcagaggtgttattcatttcgacggatgtcaaatgcaccgttggttcaggtatcctcctctttttttcattatagtgaggaaaagtcacaattccacctcgtccacccacactcatttctccccgaggatctttatacaatgactggaaatcttccagatttatccaagaatcagtacaagacatcatagtaaagatatgtgttccgggatgatagaccatcacccgctgtgatgtaagaatccaaagattcccatcgtcatccgactttatatccaacacagcatcccctgtcaatccacaatcttttgtccgggaaataaaatcattcgtatccgaagaataactatacacattgccctgtttagtacccacccaaagattgttgtccggtgcgacagtcaataccgaataattttctcctgtatcctttatttgcaaccggctttctccggaaattctccacaaccctctactttcagttgcaaaataaacaactccttcattagacgaaacgatagcatttataaaaccaacatcatcacaaactgtagtcaatcggccttcctccaagctataccggaataaatggtaagtagtccctatccaaagattcccacgacggtcatcatgcaaagcacggatacgctcaccttgtttaatgggtatggtacatacgatggattcaaaaagccggttctccttataccgaattaatattaccgaatgatcccttaccatatagagtccctctctatccgatggcctctcaaagaaaaaagaaagctccctgtcattcttaacaacagacatgcgatctctttgaggatcataagcatacagccccaatttcttttgtctgatccaataataattcttctcttgagaaaactgcataggagacgcgattacccccaaattttgctttaccccttccatagacaaaggaagcacttcattaggaagaaaagaaataatgaaagaagaaggataataacctgtcacccataaatttccggattgatcggaaagaatctttgtgaggattttcctgtcagctgataataaacgggagagatccaccttatccaaggatgcatcggccgttattttataggcatataagttatctgccgcagtcacccacaaatatcccttaacagaatcttgtataatatgatgaagctttcgggcatcggagttagaagacgcattatccactgtttgcaatccaaacattttgtccgtatcctgtgccttggggtcaaaacgtacaattccttttccccaagtagtaacccaataatacggagtgttatgatcttccgtcatgcttgtgggatactcatcatagggccaaggatatgaaataaaagagtcctttaccttatcatagcaaaaaagcccgccttttgcttgagttacccaaacagtctgtttcttatcctcataaatagaattgacggtattctcttgtcctttccatttaagaatatattttccagttctttcccctgactcattgtatcgaaacaaatgcctgttagtcgaaatccagatcgtaccatcagacgtcgctgtcattgtagttatagtccagctctttatcgtttcatcagcaagcgcccttatctcataatctgtttttgacaaaatataggcgccacgcttcgttccaaaccatattttcccttcaccgtcttcagtaatacacgtcacactgttgttttccaagattcccggatttttgaaatcagaacggaacactttcaccgtatatccatcatcacgacacaagcctcccccttcagtgccataccacatatatccttccgaatcctggaagatacaaagcaattctttggtcggcaactgttccgaattaggaaggtttcttactatcatatcaaatgctttgaccggaacggcatttatccgcacagtcaataacaaaataatgattggtaatactatccttcctatgtttttcatattcttcacgcaagtactcctgttgaaaacaaacgaatacaaagctaggaagaaattcaagaacttgcaacttgtcggtttaatcaaaaagaaaatggttacaatacttcggcatctttttaccaaaattttaaaattaaacactaggaccgactaaatctggttcaataatactaaaaaggttattgactaccctaaaagaaaatgaagaaaaagttagcaataaaccttcgataaaaacaaaattatcctgttaattctttctcttatatgctatgagcttgccttatatgcaatcgccctccaccgtcagaccaagtggcaaaaaggaaaagttgccatagatatgaaattcacggacaaacacccctatgctgtccgaccggaaggaaactttcaactgcaaagtatctcccggagcagcatgaaacttggagtatctcgtttccggacaatcccaagaagaaacaatgcaataaatatgtaaactgtcacttcccatgtttttatagataaaaacgccaccactaaaaaagtcgaacaaacaaatcgccaagcaatctttttcatttatttctccttatacgattccccctgaaaaatccttcaaaagcttcagccctcccgcaaaccctttgcaggagggcgttccggctgaaggatcacaccgggaaaaagtttcaggccgcggaagaatccttcagcttcaccagccggtacacattgccatactcggtatgaacacgctgtatccctaatgcaaccatcatcctgcccaaccggttcggagtcaccccacgcatggccgccggataatgtttctgcaaataattgaacaaatccgtcgtggtatagggcttggacaactccccttcctgcggcatccggaaacaacgcaaaaacaattcctgttcggcaggcattttataaaaattccggttgctgtgctgtatctccttttcttcctcttccgagaaccagtaacgctctcctccggccagctccgctttcagctgggcgaacagctgcgcatgatcgggcggtgtgcagtcaatcttgccatccacttccgcacaaaggaaacggcggcttcctgtgggatcagtcagcaggtccgtcatattggacgtaccgatgaaagaagcgatacggggcagatgactgaatgccggacgatgtgccctgcggaaagtcagtgtggtcatctgcatcagattcttcaaggcaggcatctgcccggcacggtacttgtcgaactcatccatattgatcagtccgaaaagcgaaagtttctgttcacatccactctcgctcgtcaggtcgaacttgtctatataataaggtgtaagttccttgggcatcaaaatcttgcaaaaagaagacttgcgcttcccctgctcacgactcaccaacataggcgccaccgcattggcgcaatcctgcgcctgccccagccattgggcggcaacacccagcatccaacggtgaaaccctttcacccacatcggcttacgcgatatacgcacggccagcggagttacacgatccactccgtcccactgaggcaagtggctcatataatgtagaaaaggatgatagttttccacctttctggaatggagcagacggctcacatccttatcccagcagttgatgccaccggaacgcgcctccagacagaatgtattcaaatcgcgttgagccactataccatactcttcatccggcatctctttcccacgatactccgtctgttcggtgagaaggttataacggaaatcatagcgtgcggtcaaaaagcactgcaaggccgccagcatattctccggtttcttgcgccccgatttgccaaaagtcgccttttcatcgatagtttctgccatgccagctgtttcgacagccgctgggagaacaatttcatccaccgtttccgtagccgttgaaggcaacaccccttccgcatttccggtttgccccaccgactgcccggtaaccggagccgtgctttttcccacgcatctcctcattttcatactctttttgcaccaactcagtaatttttccactaattttttcatcctttttcattatttggggttgtgtaatatcacaaagataacactcaaaacacccttttacaagcatttaccccacactaccgcaaaaaagtgactaagcgaaaataactgggaaattattcgtttttatcaagactatttcatacttttgcaccgtcaagttaatcgtttcactagaatgatgaaatttcatcacctaagtgatacaacttcatcactagagtgatatgatttcatcactaaagtgaaacgattaacttgaaaggaagttgcagcaaactcttccgtacaagaaagcataaacaaccggataaaaacaaataagcgaatggctatcaaatttgaattttatgaatcacccaatacgataggtacgcgcaagaagcgctatcacgcccgtgtagtaaactggcagcgcatcaacaccgactatctggcacgggaaatacagtacggctcctcgctcaccgtggcggacatcaaggcaaccattatctcgctcagcgagaaactggcctactacttgaaggacggtgcccgggtacatatcgaagggataggatatttccatatatcgcttacctgccccgagacacggacaccaagctccacacgtgccaacaaggtgaaattcaaatcggtgacattccgtgcggacaaatacctgaagcatcagttgagcgacgtcaagaccgagcgttcgaaatacaagccgcactccatgccggtaaccaaagagagtatagacgaagcactgacggaatacttcttgacaaacagcgtgctgacacgccggaagtttgaatcgttatgcggactgacacgagctaccgcgggacgttatatcgctcagttggcgaaagataaaaaactgcgcaatatctccattccgcgcaaccccatctatgaaccgatgccgggattctacggaaaagagaaattgcccgaaccggagaacgaaacggaaaacgtatcggcaacaaacgacacggacctgacaataaagtaaatatacaacgaaacaatataatagaaaacttctacaaacgaagctcaaaccataaagagctgaaacttctacactaggctgaaggaattccgggaggaaatccttcagccgcttttctttattgacgggcgtttgcgaaggggctgaaggatttgaaggaaaaaacaagggaaactcagggagaggtacttttcagcccaccagccataccagcatgggcaagtaatcctttaaggaaacacgaagcagcttcaatgcctgctggatgcggtaagccaccgtctgtggtgacacatccaacacttcagcaatttctttataactcagttccttaaagcgatgcatcacaaaggcttcccgataactgtcgggcagagcagccatcgcctcctttattttccggtccaattcctcaaaacgaccatagtccacttcacacaatgccgcctgtgtccgctcataaaaggcagcttccgccttggttttcacctgttcccgcgtcaagtggttcaagaccctccgataagtcattttgaacaaatactgattcaatgaagactcgattatcaaatccccacgattctcccacagccataacatcacctcctgaacaatctcttcggcatcttccagcgacaccaaccggtgagcataggcacacagcataggatagtaccttctgaataaatggtcaaaagaattaccatccccctgtcggagagcattaaacaaagacaagtcttccacggtatgattcatagtataataactgttttccttgtgcacaaagatagttgtttttatcggaaaaaacttttttttaaaaaaaagcatttttcgtttagatacctttcattctcgcttgtcttaataatataaaggaaaaaattaaagtataattcatggaaaaccataccgatatagaaactttgttgaccaagtatttcgaaggaaacaccactccgccggagaacgaacagatagaagcctggctgaatgccgatgaggagcatttgcgtatagccaagcagctgaatacgctctatctggctgtagacacacagcacatcacaaagaagatagatacggaaaaggcattagacaaggtaaaaagcagaacaaaagttagaaacctgtcctggtggggatggacacaacgcattgcggccatcctgtccgttcccctcctgataggtgtattggctctgtatccggacagacagcagccggtagtcaccgctcagatggtggaaataaaaaccaatgcaggcatgactacctccgtcctgttaccggacagcacggtagttcacctcaattcggaatcctccctccgctatcccaccttttttgccggcgatgtacgccaagtggaattaaacggtgaagcttatttcgatgtgacccaacatccccggaaacgattcatcgtttccacccctcaccattcgcaggtggaagtgtacggaacaagttttaatgtggaagcatacggtaatgaaactcccatttccaccacgcttatcgaaggcagcgtagggtttatttataagaatagcaaaggaaaatttcaaaagagtatgctctcccccagacagaagctggtttattctccacaaaccggagatatcaagtgctacgctacctcgggcgaatcggagatttcatggaaagacggcaagcttatctttaatgacactccgctggatgaagtgctgcacatgcttggaaagcggttcaatgtggaattcgtattgtccaacaaggggctgaaaggctgttcgttcacaggaacattcacccatcagcgtctagagcgtattatggaatatttccggatttcttcccacatacgctggcgttacattgacagtgcagatataaagacggaaaagctgaaaatagaagtgtactaatatacgtttaacccttaatttaaatactagaaaaatgaacagacaacaggctccctaaacaaaaacatacgggaggatattggcgtatcaccccgtatgaaaaaatcatctttccatgcttgtttggcgacaagcaaagacaacattttattcactttatctcaattacaaaattatgaaaatttattttagcgtccaattattatggatgataaagtcgtgtaggttaatcttaaataaaactccattacctatgaaactgagtgtactctttttaatctgttcgctaagtatgacttatgcggcagagtcgtatgcgcaaaagaccatgatcagtcttgaagtgcgtaatgaaacagttggcactgtgttggaaaagctgaaaaaagaatcggggtttgatttcttcttcaacaataaacacgtagatctgaaacgtattgtatcagtttcggcaaacaacaataatatcttcaagatattggatcagattttcgcaggaacgaatgtgaagtattcagtgcttgaaaagaaaatcattctttctactgagattgtgcaaggaatacagcaagaacaaaataaggtgacaggtattgtgaaagatgcgaatgacgaaccgataatcggtgccaatgtcatcgtaaaaggccagtcaactggtacaatcacagatatagacgggcggttcgttctggatactcccaaagatgccgttttacagattacttatatcgggtatgtttctcaagaagtgaaagtttctggaaagaaagaacttaatgttgtattaaaggaagatactgaaactttggaagaggtagtagtcgtaggatatggcgtacaaaaaaaggccaacctgacaggagcagtaagcagtgtaaaaatggatgaaatattgggtgatcgtcctgtcacttcggttagtaatgtactgatgggagcaatgccgggactgcaggtaacaggcacatcaggccaacccggtgctgaaatgtctttcaatatccgtggagtgaacagcatcaatgaaggtgccccgcttgtattagttgacaatgtagagatggacataaatatgctggatcctaatgatattgaatctatctctgtattaaaagatgccgcatcttcggctatttacggtgcacgcgctgcattcggagttatcctagttaccactaaaaagggaatgaaagacactcgcttctctatcaactactctaataacttctcattcagtaagcccagtaatttaccccataaagcaactccgttacaaacagtacaagcttataaagatatgggaacagtatcatatcagacaggacaaaatgtagatacctggttagagttattgaaagaatataatactaattcaagcaattatcctgacggttatgccgttgtagacggacttcgatacagtttacaagaaacagatctcttaaacgacatgatggaaacaggttttcaacaaacacataacatttctgttggaggaggtaataaatcaatatcttacagaatgtcagccggtatggtgaatcaaaatggaattcttgttacagacaaagactcatacaaacgttataatatatcatcttacatccgctccgacattcattcctggattactccggagttagacatcaaatatgcgaattcacattcagaacttccctatacttcagcttcttatggtatttggggagcagcagtagcctttccatcttattttccattaggcaatatggaactggatggtgaaatcttgcctatcaatactcctcataatttcatcaatctgtcagcacctaaagaaaatgacagaaacgatttacgcatctttggcaagctgactattactccgttcaaagatctgaaaataatcggtgaatatacatttaatagaaagactagagaaatcacaactttcgataagaaatttgcttatgctcacggagctaacttccgcaaagaacagtctgtttcaaattcgaaatatgaaatagaaaatcgggcaaccaattataatgcttttaatgtatatgccaattacaacaaaacattaggcaaacatgacattggaattatggctggtttcaatcaggaaagcaattcctataagatgatgaaagcgtcacgcacagatatgattaacgaagatttaccctcattatcacaagctacaggagattataaaaacagtgatgaatttgaagaataccatgtcagaggattattctataggataaattactcttatgccggtaaatatttactcgaaacaaacgggcgttatgatggttcttcgaaattccctaaagaaaatcgtttcggcttctttccttctgtttccgtaggctggcgtgtcagtgaagagcaatttatggaatggagtaaagtttttctttctaacttaaaattgagaggttcttatggtaatatcggtaatcaaagtatagaaccttatgcttttattcctggcatggattctccattggctaattgggttgtaaacggacaagctactacaacattggctcctccagccctagtcagcaatagtttcacttgggaaaaagttagtaccttggatttcggatttgacctaggactgtttaataaccgcctaaatgttgtatttgattggtaccaacgggatacaaaaggaatgttggctccaggtatggaacttccaggagtattgggtgccaaagccccattacaaaactctgccgacttacgcgccaaaggttgggaaatatccttggattggaatgaccgtatcggcaatgtgcaatattatttaggttttaacctatatgactcgcgtacgaaaatcacaaaatacgacaatgaggtaggcttactaggaaaagattcggatgacaatctgatttaccggaaaggaatggaattaggtgaaatatgggggtatactacagaccgcttatatactaccgaagattttgacagtcaaggaaagttaaaaaacaatattcccaaagtggaaggttataatcctaatccgggagatatactttatgtggattttgatgggaatggtatcataaacaatggtaaaaacacatcaaacgaaccaggcgacactcgtattatcggtaatgatactcgcagatatcaatacggaattcgtggtggtacaacatggaaaggtatttcactgtcatttattttacaaggagtcggcaaacgggatctttggctcatgaacgaactattctatccacattacgatgcttactcaactttgtttgactctcaattgaattactggactccagaacatacaaacagttatttcccacgtttatatgaaaaggtagaaggaaacactaaagccaatcaaaaaccacaaacccgttttttgcaaaatggagcatatttgagcatacgcaatatcagtttatcatataccttccccataaaactgatcaagccgctgggtattactaacttatcagtatttttcagtggagagaacctctttacatttgatcatctgcccaaagggatagatgctgaacgtgtagtaacagacaatttgggacaacgtggatttacttatccttatatgcgtcaattctcatttggtattaatttaagtttataataaaagctgacattatgaaaaaatatatagtagcagcaggactcttcctgttgatgaactcttgtttaaataatgattttatggaggtatatcctaaagatcaacaaacggaattaacctctttccgatcatatgaaaacttcaagacttactcttggggactgtataacgtctttttcggctatgcatataaaacaggacaaactgatgaaatctttaaaggagattatgaagctgacaatatgatcaagcatgtctcaggcaatgaaagccaatgggcgtatcaaaaagctaaggtacctgcatcctctgattcatgggattatgaatacatccgccgggtaaatttaatgttggacaatatagaccaatcatccatgaatgatgcagaaaaagcacactggagaagtgttggatatttttttcgcgcttataaatattttaaaatgttgtctctatatggagacttaccatgggtagaacataccttatcagaagacagcgaggaactatatctccctagagacccacgggatgttgtggcccaaaatattctgaataacttgaaatacgcagaagaacatatcaaagtagacggagatggcaataatacaatcaatcgagctgtagtacaatcattaatctcccgtttttgtttgtttgaaggtacatggagaaaatatcatgccctaccaaatgccacaacctatttagaagaatgtacacgggcttccaaggaagtcatgaataaatatactaccctacaccccaactatgaagaacttttcaactcagagtctttagctggcatcaatggaattattctatacaaagagtatgctaccagccagctatgccatggactcacacgtatggtaagaaccggcgagtcacaaatagaagcaaccaaagatgccgtggacagttatttgtgcagtgacggacatcctatcaaaaacagtaccacatacggaggtgacaaagatgtgtatgcacagttccgcaacagggattatcgtctatatcacacagtatgtcctccctatatggtaagtctagcaagtgcctctactactcaatggaagttcacagataatccctctgaacgcgagtatattgacttgatggcaacaatttctaaagaaacttatcaccggttgccgacatctaatttcaaaggttttataaccaaagggcaaccccattttaaaaatgtcaattggggacagggatggaatgccagccaaatgggtttctgggtatggaaatactataatacccataccgatgccagcactgccaatggagtttgtactacagacgctcccctattcagactcggcgagatactgttgaattatgccgaagcaatgtatgaactagggctattcgatcaatctatagcagataaaactattaacaaactgaggaaacgtgctcacgtggccgacatggtcttgacagatattaccacagattttgatcctgaaagagatcaagatgtaaatcctttactatgggaaatccgccgtgaacgccgcgttgaattaatgggtgaaggaactcgtctggacgatttacgccgatggaaaaaaggacattatgtaaacaaacaacctactggagtctatttaaaagatgcaagtgaatttaatgtaaaagttatgaatggtccatccaacaatgaaggatatgtatattatttcgagaaacccatagggtggttggaacattactatctaaatccaattcctctaaatcaattggcactcaatcctgctctcgaacaaaatcctggatgggaaaacaataaataaaattatgcagttaaaatacactttgttttcaagcatttcaatgcttgccttctcttctctgtctgtattttcacagacagagaaaatgaacgttctattcttgatggcagacgatatgcgccctgagttaggatgctatggggtaaaagaagtaaagacccccaatattgaccgttttgccgccagcgggttattatttcagaacgcttactgcaatatcccagtaagtggagcttcacgcgccagcttattaacaggagtgtatccacactatccagatcgttttgtcaactattccgcttatgccagcaaagattgcccgaccgcaattccgatatcaagatggtttacatcacatggctattacacaatctcaaacggcaaggttttccaccatctttcagatcatgctaattcatggagtgaacccccttaccgtaaacatcccgacggatatgatgtatattgggcagaatacaataaatgggaattatggatgaatgaagcctccgcacgaactatcaatcccaaaacaatgcgtggacctttctgtgagtgggctgaagtacctgacaccgcttatgatgacggaaaactggcattaaaagccattgcagacttaaaacgtttaaaagaacaaggaaaacctttctttatggcatgtggattttggaagccacatttaccttttaatgcccctaaaaaatattgggatttatatgaccgagagaaaattccagttgctaacaatcgttttcgtcctaaagatctaccgaatgaggttaaaaactctacagaaatctacgcttacgcacgtaccaccacagcagatgatatttcttttcagaaagaagccaaacatggatattatgcttgtctgagttatgttgatgcgcaaatagggaaagtactggacgctctggatgagttaggtttagcaaataataccatcgttgtattactgggagaccatggctggcatctaggggaacataactttctcggtaagcataatttaatggatcgttctactcacgttcctttaattgtacgtgttcccggattgaaaaaaggaaagactaagtccatggtagaattcgtagatttatatccgacactatgtgaactttgtcatttgcccataccaaagaatcaattagatggcactagttttgttcctattttaacaaatttaaaagcaaaaataaaagaccaagtatatatccaatgggaaggaggggacaatgctgttagcaatagatacaactatgcggaatggaaacaaaaagaaaagattcattctcgaatgttgttcgaccatcacatagatccagaagaaaataagaacagggtcaacgaacgaaagtatagaagcgaaattaataagctctcttcatttttaaaggctaaaaaagaaactttaatgaaatcacaatgaaaaaactttccggtttacctgctctaaccatcgagattggattataactgaaagcaatttgacgattgttttttagggacattcagtaaatcctataaaaaataccatggcatatgaagatgatagagtataatcacttcatatgccatttttattgtcatttttctgtctattctcatatactcttattgggcaagacatgaagttccggaagaagtctgctgacctcttctgattctttcaataaactcatatcatgcagctttccccgttctattcctaatcttgtcaatcatcagtatggcatttgccgtatgtattccgaagaaaatccacaggatttccgtcttcctcttccttgcctttatccttgcgagcgagtaatgttgcttttgagtgccgaagcttccttcaagtcgagtggccctttcttttgagagttcgcttctaagcaccttcctcaaaggctcatcttttgccgccctccccttgagcacaaaagatgtggatattccatattttgtacagaaaaaaatagggaaccactatctattgttgatggctgaaggaggatcggattataaccatgctgttaccgccctcactgctaaatccctctggggaccgtatgtaccttgtaccatcaatcccgtattgacacaccgccatcttggcaaggactaccctgtgcagtctctcggacatgccgatctggtacagacaccgaccggagattggtatgctgtgtttctcggtaaacgaattgtggaaggaggactggtgcctttaggacgcgaaacctttctttgtgaggtgagttttcaaagcggtgaacctattttcaatcccggcattggtgttatcggaaaccgattgaaacgtccacttttaccatggacgccggtgtcgaagacagataaacagaatgattttgaaagttctgctttatcaccggaatgggctacaatgcgtatccctgaacaacctttccatcattttgccgatggcaacttgtttttgtctctccgacctgagatggcggacagtctggtatgtccctccatgcttctgcaccgtgtacattctcataatttttctgccatcacgacaatgactttctctacctgtcaggcgaacgaatgggcgggcttggttctgtatcgtacagctaaaggctattattcattactgaaaggaaagaatgaaatccgtttgacaatcgataaataaagcatcataccaatggtttgaatataaggaagaataattgtaagtttaatccccctttcccataatttccgattttttttatatctaacactaaaatcaactggaagttatgggaatatgtctgataatttatcaatattaattaaatccgttccttgcaactatatttagaatacagaaattcgaatcgcacttttgcccagtttgcatccacttattcgtttcttttttgtactttagcctaagcttatcttacataaagtgacagataagtacaacgataaataattgtttataccatgtatataccaccatttaccatatcaaccaacgctatcaacttgattgcagaaatatctgcacagattgagcgatacgccattcgtttagagcaaagcgatgggctgagattgcgaaaagccaatcgagtaagaacaatccatagttcattggccattgaagggaatatgctgtcggaagacgaagtgaaagacattattgatggtaaaacggttatggcacctttgcgacagattcaagaggttaaaaacgctataaagacctatgagctttacgaaaaattaaatccgtttgatgtaaatgacttgttaaaggcacacggtacaatgatgatggcactgaccgacgatgccggcaaattccgccgtggtggagtcggtgttttctcagaagaaagattggtacacatggctccccctgccgatcgcgttccttttttgatagatgatttatttgagtggctcaaacaggccaaagaccatttactcattcgcagttgtgtgttccattatgaatttgaatttattcatccattcagtgatggtaatgggcgtatgggccgtctttggcaatcactaattttaggcagactgcatccgctttttgaatatctgcccgtagaaaatatggtctatgccaatcaagaagcttattataatgcaatacagcacagcactgcaacagctgattcaggacctttcattgaatttatgcttcaagagattttaaacaccctcaagagacatcaaggcagtcttatatctcagcacaatgtgatggaagttcgggataaaattcgggataagttcgggataagttcggaacaaatcattgaacaaatccagcgtaatccggctgtcacccttgatgaaatcgcagctgcactctccgtcacccgtcgctcgattgaaaagaaaatcaaggaactgcgtgatgccggttacataagacgcgaaggaagcaataaatcgggacgttggatagtgaatgatgaggtctaatgtctggatgcgacattcatcaagccacaaagatacttgttatcagtcgcccatcaaaagccaggattcataaaaccattgactaagtttatcaaaagaattatattccttttagcctgtttaaatttgcatcagcattgtcattctgaaatgaaaacaaaaatttaaacaggctttaaaaacgatcatgtcactttccgtgcgcagccatatacgccttcacctgttcactaatctgtttcatccctttcaccgaaggatggccgctcatcttatcaagccctttcaattcgatgcaatcgatctgataatgtttgcaaattgttctgactgattcagttatctcgtttcccaaaccatcattcaacaaaaaatagatctccacattaggatagtaatcaatcattgtatccagcatataagccatggcagggcggaaagaatacaaatcttttttagaccaatccgcatactgatactctcctaaaggtgatttcgcccaataatcattagtcgcgccaaaaataaaaataatatcaggacagcccaacgccttcatccgggtgatgaaagaacggtcgctataatcctccgaacggtaaccggtatggcaaatagtagcaccggaaaacgaattattcacacaaagacggtagttgttctccttaataaactgatgccaccaggtattacgtacagaaaccatatctgtcttccgtcctttaggaggcgtcttcagataccatacaaaattagtatcgggctgaacatagccttcgaaagtggaataagaatcccccagaatagaaacggatttcaaaccttgagcaatgcccggatgacagaacaacgtgcaaaacagcagagttataatatactttttcataggtatttgattatttcgccttcaaatatacagcatattttggtttaactcctataaaaataacctttttcttctatttacagacaaacaagaagacatcgaaccgctttataaaaataagaacaaatccaatggttacaaattcgatctataaacgtcactacctataagagccgcaaaatgaaggccatttaacttttaaaaaactaagtatgacaagaaacgctttttggggactgtgtatcgggatatgtatggcaagcacacaaagtgtcgctcaaaagatagaaaatacaaatatccaaactgataatcaaaaaaactataccccaccccatatcaatgaaattaccaatggggaatctttatatactgtccgaagcgacacaagtcttcataacatcagaacaatacaagcaaactcgaatccggaagtattggataaactgacagcagaactgaaaccggctatcccctatttaaatgaagtaggtgcacaagccatgccccggaatatcgttccaatcaagaatccctatttcaatatgcctcaactgaagcgtcccgttttccctgatttcatcgtcaatatgaaaggcaaaggaatgacagaagatgcccctattacggatgtagtgaaccggacgattgccgaagtcagcaaacaaggaggaggaacagtcgtcattcctgagggaaaatggaaatcgacccgtattgtactgaagagtaatgtcaatctgcatttagccaaaggagccgaaatagagtttgccggtcgcgcggaagattatctgccggcggttttcacacgccatgaagggatagaaataatggggccggccgcctttatttacgccaatggggaaaacaacatcgccattacgggagaaggaaccatttacggaccacctatggatgctgaaatcagaaaacgtcctaacggtgcttcagtggtagaaaaagatgttccgtgggacatgcctatagaacaacgtatctatgacggtatggaaggcaggactttctatcgtcctaaaacaatctctcccatcaactgtaccaatgtattaatagaagggatcacgatggaacgaagtaccttgtggaatgtggtacccatttattgcgagaatgtaattataagaggcattaccgtcaactctaccaaggtgcccagcggagacggcattgacatagaatcttgtaaaaacgtactgattgaatactgcacgctgaactgtggtgatgattgctttaccctgaaagccggcagagcagaagacggattacgtgtaggcaaacctacagaaaatgtagttatccgctactcgctggcccagcatggacatggcgggataacttgtggtagtgaaacagccggagtgatcaagaatctgtatgtacacgattgtgtattcgacggaacccgtaccggcatccgtttcaagacacgacgcaaccgtggaggaggcagtgacaacacgtactatgagagactgcgcatgatcaatgtaggaaaagcctttacctgggatttgttgggcagtgcttattatatgggcgaactggccgcacgctatccggcaagaaaagtaaaccggctgacgcctgatgtaaagaatatcctgatcaaagatttcattgtagaatcagccgaccagttctttaccgccaatggtattcccgaaatacctttcaaccaggtagtggtggaaaatggagagatcaaatgcaagaaattaatcggcgccctgaatgatgccgccggatttacgatgcggaagctgacgatagaagcacagcataatgacattcacatattggatggaaaagacatcctgttcgaggatatacatttcaaactccccgccggagagatcatggtgaatgtggaaggggaaagatccggaaacattgttttcaagaacatcaatgccaatcaggaaaaggttgagtataaaaaggaatctcccatgaggatagaaataaagtaactaaatatcggtctgatttggaacgcaaatgacgcaaatgacacaaatttaacctttcggtaggttttgcctctatgtagtgagggggctttatttgtgtcattcgcgtcatttgcgttccaatctttctcctaaataatcacacttatcacacccacttccgcaactataatcccctataactgtatcatttttcatcataatgtatgattttccattgtaaagcgggttatcccgccttatttttgtatcatgaaaacagtattcaatggtattatgaaaaacaaatggaccaaactggcggctttagcaatagctgccctgtggagtggaccaaccgtgcaggcacaagctccgcaccccgaacgtatctatttatcgggaaccggtattgacaacaccaagacttgggagttcttttgttcgggaggacaaaacagtgggaaatggaaaaagatcgaagtaccctgcaactgggaactgcaaggattcggagaatatacttacggtcgttggtatactataaaaggtgaaaggccaagcgacgaaacgggtatttaccgatataaatttgaatctccggcaacaactcccggtgagcggataaaaatattctttgacggagtgatgaccgacacgaaagttttcatcaatggaaaacccgcaggcgaaatgcaccagggaggattctaccgcttcagttatgatatcaccgatttattgaagcccggcaaaaagaacctgcttgaagtaaagatagccaaagaatcagccaacaaatccatcaatgcagccgaacgtaaagccgactggtggctgtatggtggtatttacagacccgtatggctggaagttgtcccggcagtccacatgcgacattttgttctgaacgccgatcagcatggaaaattgcaagcgacaatagaaatggaaggggatgccaaaggatatgaattgtctgtttccgtccgttcattaaaggatggaaaagagatgtacactcaaggacacaaacctaccgtttctcatcagattaaggattcgaacaaggaacagttggtggaaggaaactggatgaatatccagccttggtctacagaggaccccaatctgtacgtagccagactggaactgaaagaccccgaagggaaaacggtgcaaagccgtgaaacgcggataggtttccgcaccattgagttctttccacaagacggagtttatctgaatggaaccaaactagtggtgaaaggtgtcaaccgccattctttttccgtagatggaggtcgtgctaccagtgcggttatgagccgtcaggatgccttgctggtaaaagaaatgaatatgaatgcggtccgttcacattatccgcctgatgaacatttcctggatatgtgtgattcattaggaattgtctatatggacgaactggcaggatggcaaaacggatacgattcaaaagtaggtcctaaattagtcaaagaaatgatagaacgcgatgtgaatcatccttccatcattatttggagtaatggcaacgaaggaggatggaattataatctggatcctttattcgccagatacgataaattacagaaacgccacatggtacacccttgggccgatttcaatgatctggacacccaccattatcccacttatctgaccggagtggcacgttttaccaacggctataaagtatttatgcctaccgaattcatgcatgccatgtacgatcagggaggtggtgccggactgcgtgacttttgggatcgttggtgcacgaaccccatgtttgccggaggctttatctgggtattctgtgacgaagcccccaaacgttctgataaaggaggcatattggattctgataaatccaatgctcctgacggggtagttggtccgcgtagagaaaaagaaggaagttactatgctatccgcgcacaatggtcgcccatccagttaaaacccctgctgattaccgaccactttgacggcagtttcctggttactaatgaatatacgtatactaacctggacaaatgtcgcatgacttacaaaatacgtacttgcgaaacacctttgaaaaatgccatggaaagcggtaaagttatcgcagaaggccatgtacaactgccagccatcgcaccaggtgaaaccggaaaagcccgcttcactcttcctgcttctttccgggaaggtgatgtactggagttagaggcatttgacaaagaggggaaaagtatctgtaactggacttatcctatccggctggccaaacaatactttgaccataaaatggcacagactccgatgaccctggaagcggtacaaccggcaaccgccactcaaaccgctacctccatcgaactgaaaagcgaccgtgtaaccgtcacttttgatccggctaccggcatgatcagccgtatcatatcaggaggaacagaagttccattcaaagacggtcctgtggcagtgggcatgaaaatgcgctacgagccaacattgagttatgtccgcaacagcaacgagggggctgtttactgtgccaaatacaaaggtgccgccgactccatcgtatggcgtcttacggacaaaggattactctatatggatgccattctgctgaatcgggcttccggcggaggtggattcgatgatgctttcatggactccaaagtattcaatctcggtctgactttctcttatcctgaaaagaattgctccggcatgaaatggatgggccgcggcccgtaccgtgtctggaaaaaccggattccgggaacgaactatggagtatggcacaaagagtacaacaataccatcaccggagaaagttttgagaatctggtttatccggaattcaaaggatatcatgccaatatgtattgggccactttggaaagtgacacgacaccgttcaccgtttattcccggaatgacggtatcttcttccatgtgttcactcccgaagaaccgaaaggacgcgtaaaagacaccatgcccaaattccccgaaggggatatatccttcctgctggacatcccggctatttgctcctttaaacccatcgagcaacaagggccgaacagccagccgggtaatatccgtatcaaatcgggggatgaagggttacatctgaatttgatgtttgatttccgacaataaacaagtgaatcgtagttagtgattaatttaatagcaaaatcatgaaattaataacttttgtatgtgccgcctttctatgccttccgtctttggcacaagaaaaatttccggacggcacacctgtatccgattggtttaaggacagtaagataatagatataaacacattaggcaagaaatacattctgacagattacggtgtcatcaatgacagcaccctgttacaaacagagaaaatccaatctgccattgatgctgccgcacaaaatggtggcggagttatcgtcattcccaaaggaacctatttaagcggagcgctgttcttcaaaccccaaacacacctgcatctggaggaaggagctgtgttgaagggaagtgatgatatcagcaacttccccatcatagatacccgaatggaagggcaaagcttgaaatatttcgcggcgttggtcaatgccgacaaagtggacggttttacgttatccggaaaaggcacgattgacggtaacggattaagatactggaaatcattctggcttcgtcgaaaagtcaatccccaatgtaccaatatggatgaattacgtccccggctggttcatatctcccatagcaataacgtccaactctcaggagtacgcctcatcaactctcccttttggactacccatctttataaatgcaatcacataaaattactgaacctctatattttctcaccggagaaaccggtaaaggctccaagtacggatgccattgatattgatgtatgcagcaatgtactggtgaagaactgctatatgtctgtcaatgatgacgccatagccttaaaaggcggcaaaggtccctgggcagaccaagacccgaacaatggaggaaattccaacatcatcatcgaagattgtacctacggcttctgccacggcgccctcacttgtggaagcgaatccatccacaatcgcaatattatcttgcgacgcatccacatcaccaatgccaatcgtttgttatggttaaaaatgcggccggacactcctcaacaatatgagtatattctggtggaggatatcaccggagatgcagaccattttctgtatatcaagccttggacacaattctttgacctgaaagacagaaaagacattcccgtttcttactcaaaccatgtgacaatgagaaacattgattttaaatgcgataatttcttcagcgtagaaaagtctgatcaatatcaacttactaactttacattcgaaaacctgaacattaaagctaaaaacggggaatgcgacaaagaaatgattgacaatttcatttggaaaaaggtaagtataaataatataaaataagatcagcagttgaataaatcaaattcaacaatatctaatcacgagccacggctggcactatccaaacgtggctcctgttttttcaacatgaaattcacaagatcccggtgtattccacatatatccggcattcgtttctttacttaatagttcaataactcttccaggcatcagcctctttggcattacgggcttttgcacgcattttcttactgaaaatgattcccagcagcttatcggcatcaaacgtagcactgatacccgcccccaccatcaaagcgctaggagtaaatttgcctgccggcgcaggttccaaacgaggatcatagcctgccaacaactctttgttgataggaatctctacataaatttgttcctcttccggagtttcaaacggtccgtacggcaataacctgatataccctctaccatctattgtatccatttgagagatataataacgaggaagttccgtttcaaacttcatgttttttttagggaagggagttgatttcattttccacttttcgggattgaacaatctgtcaatctctttctgtgtttcatcatctatcacaatttctacttgaccgctcaatagttgctgcaaacgcaaagagtcctgtttggtcaactgcttggtttcattcgttctctgggcaaatgacaacaccgagaaacaaagacataacaaaaggaagaatatacgtttcatagctatctatttttagtaacttcctaaagatacgcaaaagtaacgtatgttcatccttttcaagtctttttctttcgttctttttttcgttaattctggtaataaactcgttttaccctattagacacactggtcaagatctcgtatggaatagtttccagaatctctgacaggacagtgaccggtaaatcatctccgaaaatgatagctttatccccttccttacaatcaatatccgtcacatcaatcatgcatacatccatacagatattacccacgtatggcgctttctgcccattcaccaaacagtaggcatgtccatttcccaaacgtcggttcagcccgtcggcatagccgataggaatagcggcaatgcgggaatccctttccaaatgtcctttacgactataccccactgtttcctccttaggaacctcatgaatctgaagaatagtggtttttaatgtacttacattatggatgatctgattggtaaacggatcaattccataaagaccgattcccaaacgcaccatatcgaactgggcacccggataacgttctatcccggctgtattacagatatgacgcaatatcttatgctgaaaagcctcctgcaaacattcagaagcagcttcaaacatttctatctgtctgcgcgtaaacgaatcaaactgagccccgtcactgcctaccaaatgggagaatacagaacgtggaataacagctgtctgtttcttcagacggtctatcagttccggaatctcttcgggtgcaaaacccaaacggtgcattcccgtatccaatttaatatgaatggggaaattcgttaccccttctttttcggcagctttaatcagttcattcaataaatggaaactgtaaacctcgggttccaatttataatcaaacatggtcttgaatgctgtcaactcaggattcataatcataatggaacaggtaattcccgctttcctcagatccgaaccttcatcagccacagctactgccaagtaatccacacgatgatcttgcagtgtcttagctatctcgtatgaaccggcaccgtatgcagaagccttcaccatacataccatttttgtttccggtttcagtttgctgcgataataattcaagttatcaaccaaagcattcaaattgatctccaaaatggtttcatgcactttcagttccaaacgatctgaaatccggtcaaaatgaaaagcccgcgaaccttttactaaaatcacctcattacgcagcccagccagcaaatccgactccaacagttcttctgtagtacggaaaaaatacttttctatctcaaaacgggcagcagcagtccgaatttcctctcctaccccgataatcttctctactccccggctatgtaccaattcggctacctgacgataaagcagtttgccgctctgtcctgtttcaagcatatccgagaggataagtgtccgttttttttctttatcatcagaacgacgcgacataaagtcaagagcaatatccaaagaagccaaatccgaattataactatcattgatcaacacacagccattcttgccctcttttacctccagacgcatagcaatctgttccaaacgcgccatgcgctcggttatttgttcaggggaaaccatcatatacaaagccacagccagacaatgcagcgaattctcaatagaagcgtcatctataaaaggaatactaaattcattcggcatccccagataacggtatttaatagtggtagcatgttcccctttttgaatggactcaataaacaacggacgttcattgtcctttttcgaccaagcaatctcacgcgaggtaaaaagagattttgccacacacgaactgatcagttcgttatcgccatcataaatgatgacgtcacaatctttgaacaaagtaagcttctccatacatttatcctgtaaagagaaaaagttctcttggtgcgcaccaccaatattagtcaaaatccccacagtaggtttaatgatagtctgcaacgcctccatttcccccatttcggaaatacccgcttcaaaaatagccaactcagtgcgttcattcatcaaccataccgaaagtggtacacctatctgtgaattatagctacgtggcgaacgggttaccacacggtccgggctcagcaattgatacaaccattccttcacaatggtttttccattgctgcctgtaattcctataaccggaatctgaaactgctcccgatgcttttccgccaatttctgtaatcctttcagaggattggccaactgcaggaaattcgcatcttgaaaagatttcatatcggccggcaattcgcccactacaaaattacggactccacgttcatacaattccggaagatatttatgcccgtcattccgtttggtttttaaagcaaaaaataatgtttcttccggaaagcacaatgaacggctatcagttaaaatccaatcaatctgtgcactacggtccccaaaccgctttgctcccagaactttttctatattttcaatcgagcttgacattgttctaattctttttgaaggtcaaaatacgggaacttttctttaagtcgctctatctttaacactatttgagttaaaaatttgcgatatgtttcagattgggcattaaacggtttgtgagctaaagccttccggatatcctcccactctttcattattctatccgtttctttactaaaataacattctgtaaaacattcccataaataagatacagcaacaggagaaggatgcaacatgtcatctgcataaaaacgataatcacgaagttcatccatcatgatttcataagaagggaaatagtaacaatcagaccagcggcggcacaattcatccaccgcaagaagcaaagtggacttacttatctgattaccatgcataccatctttgctatgccgtatggggctgacagtgaaaagtatcttcaagaacggatttacttttctcaattccaccaacacacattcccattcagtgacaatttcctctaccgtaagaagttgtcgggtaaaaaggctgtcgggctgtttgtggcaatttcctaccaccatggtcctttccttcagccaataagcaaatgcagtcccccaagtaataaccagccaatcaagctgaggaagtccggctgaagcctgttccagccgcgtatttatagaagacaaacaagatgctgccgtagaggctgaaaaaacgctatgatgcatccaactgtgccaacagcctccggcatagaacaaatcctcctccgtatatgtttgatgggatagaatttgccaaagagcttccacaatggataaaggattatagaggattccaaaaggatttacatcacaacggaacttatttgccaacaacaaatttccgatgttttctgcaaaacaagaaccaaatagcatgattcggtccgaatgccggatttctgtttcccttttaggtaattctacttgcgttctgaaattcatacgataaggaaagcttttaaaatttaagggcaaatgtaatcataatacacatatttatgctatttttgcacgatatttatcatatcataggaatggaacaggataatttatataacttactgcaaagcatagatactccggatgatttgcgccatttaagcgcagacaaactgcccgaagtgtgtaaagagctaaggcaaaagattatagatgagctctcatgtaatccggggcatttcggttccagtttgggcgtaatagaactgaccgtcgccttacattatgtattcaacacaccctatgaccgcattgtatgggatgtagggcatcaagcttacgggcataaaattttaaccggacgccgggatgcgttctgtaccaaccgtaaactgaatggcatacgtccttttccttctccatccgaaagtgaatatgacacatttacttgcgggcatgcgtcaaattctatttccgcagctttaggtatggctgtagcagccaaaaagcacggagagaataaccggcatgtcgttgctgtaattggtgacggttccatgagtggagggctggctttcgaagggctgaacaatgcctcggcaactcctaataaccttctgattatcctgaatgacaacaacatggctatagaccgtagtgtaggaggcatgaaacaatatctgttgaacctgcaaatgtctgaaggatacaaccggatacgctataaaatatcacaaatgttccatcgatggggtatcctgaacgaagaacgccggaaaagcctgatacgatttaacaacagcctgaaatccatgctggtacaacagcaaaacgtatttgaaggcatgaatatccgttatttcgggcctattgatggacacgatgtcaacaatttggcacgtgtattaaaagagattaaagatatgcaaggacctaaactgctccatatacataccaccaaaggaaaaggtttcggtccggcagaaaaagctgccaccatctggcatgctccgggcatattcgacaaggaaaccggagagcgtatcgttgtcgataccaaaggaatgccccctttgtttcaggatgtttttggaaataccctattggaactggcccaaacaaatgataaaatcgtaggagtcactcccgcaatgccctcagggtgctctatgaacatattaatgaaagccatgcccgaaagaggttttgatgtgggaattgccgaaggacatgccgttaccttttcaggaggaatggcaaaagatggtctattgcctttctgcaatatctattcgtctttcatgcaacgtgcctatgacaatgtgattcacgatatagcgatacaaaaactcaatgtagtattgtgcctggaccgcgctggattggtaggagaagacggtcctactcatcacggagcattcgatctggcttatatgagaccgatacccaatctcattgtggcctccccttacaacgaacatgaactgcgttgtttgatgtataccgcccagttacctgacaaaggtccttttgtcatccgttatccacgtggaagaggttcattggtagactggaaatgtccaatgcaagagattgagataggaaaaggaagaaaattgaaagaaggaaaagacatagcggtcattacgctggggcccattggcgttcaagcagaaaaggctatcacacatgccgaacaggaaacaggaaaaagcattgctcactatgatttgcgtttcttaaagccgttagatgaaagtatgttacacgaaataggcaagagattcaagcaagtggtcactgttgaagacggtgtgctaaaaggtggaatgggcagtgccatactggaatttatggcagacaatgagtataatccgcaaataaaacgtatcggactaccggatcaatttgtccagcatggttcagtaaaagaactatatcatatttgcggcatggacgaagaaggtatttacaaagttttgatatcattctaagagagacgaacaatgaaaatcattattgcaggagcaggagcagtaggcacccatctggcgaaattattatcggatgaaaagcaagacatcattttgatggatgaaaacgaagaaaagttgagcaaacttgattccaacttcgatttaatgactgtcaatgcatcccccacctccatttccggccttaagaatgcaggagtggcaggcgcggatttatttatcggggtcatgccggaagaaagccgcaatatgacggcctgtatgttggctaccaatatgggggcaaaaaagactgtagcccggattgacaattacgaatatttacttcctaaacataaagaattcttttcccaactaggagtacactcactgatttatccggaaatgctggccgccaaagatatagtagatgccatcaaaatgagctggatacgccaatggtgggaattttgcggtggtgcattggtcctgataggtaccaaaatgcgcgaaacggcagaaattctgaacgttccccttcatgaactgggaggacgtaatattccattccacattgtagctatcaaacggggaaatgaaacaatcatcccccggggagatgatgttatcaaactgcatgatattgtttatttcacaacaacaaagaaatacattccctatatccgcaagattacaggaaaagaaaattatcccgatgtacgcaatgtgatgattatgggcggcagccgcatagctgttcgcaccacacaatatgtaccggattacatgcaggtcaagattattgaaaatgacatcaacagatgtaaccggctgaccgaagtggtagatgacaaagtaatgattatcaacggagatggacgggatatggatctgctcatggaagaagggttaaaaaacacggaagcatttgtcgctctgacggacaattctgaaacaaacattctggcttgtcttgccgccaaacgtatgggagtaaccaaaactgtggcagaagtagaaaatatcgattatatcagcatggcagaaagcctggatatcggtacggttatcaataaaaaaatgattgccgccagccatatctatcaaatgatgctggatgcagatgtttccaacgtaaaatgtctgacttttgccaatgctgatgtagccgaatttacggttaaaaacggttcacgtataaccaaatgcgctgtcaaagatgccggccttcccaaaggtgccaccattggcggactgattcgcaacggtgaagggatactggtgacaggtaataccgtcatccaacctaacgaccatgtcgtagtattctgtctaggtatgatgattaagaaaatagaaaaattcttcaattgatgataaatgcaaaaatgatagcccggattatgggggcgttattcttcatcgaagcggggtttcttattctatgctcgtttctcgctgtctattataatgaatcagatatttcagctttcctatattctgccgcaataacagccggagcaggtagcatagccgctttagcagggaaaaatgcagaaaagagaatcagccgccgcgatggatacgttattgtaacccttgcctgggtgtttttttctttattcggtatgcttccattctatctaagcggatatattcccactataacggatgctttttttgaaaccatgtcaggattcaccaccaccggagcaagtattttggacaatatagagtcattgccacacgggcttttgttctggcgaagtatgacacaatggatcggaggattaggaattgtcttttttactattgccgtattaccgattttcggagtaggcagtgtacaattatttgcagcggaagccaccggtcccacccatgataaagtacatccgcgtattggagttacggccaaatggatttggactatctatttggggctgaccattacagagattattctgctggttgctggaggcatgaactttttcgacagtgtatgtcattctctgactactaccgccacaggaggatattcaaccaaacaaaatagcattgccgccttcaactctccttacatagaatatataattacgctattcatgtttttggcaggtatcaatttcaccttactatatctactgttcttaaaaggaaatttcaaacgcttattccaaaatacagaactccactggtatttgggaactgtgggattttttacccttttcactaccgtcactcttattttcaccagtccgttcagtattgaagaatctttccgtaaagccatatttcaggttgtttccttacaaaccactaccggattcatttctgcagattatatgacttgggtacctgtactttggacattaatgtgcatcatcatgctgtttggagcttgtgccggatccaccacaggaggaataaaatgtatacgcatagccattatgagccgtgtttctaaaaatgaattcaaacatatcattcatcccaatgctatacttcctgtacgtatcaaccgccaagttatttcatcaacaaccaagtcagcagtacttgcattcatttttctatatatggctattatttttattggatggctggttcttatgctgtttggagtagggtttgaagaagcttatagcgtagtcatttccagtttgggcaatgtaggaccaggtattggaaaatgcggcccttcctattcatggaacgggttaccggatgcagcaaaatggataagtgcaatattgatgctgatagggcgtttggaattatttaccgtacttctgctcttcatgccgagtttttggaaaaagcattgacatttacgtcctataaccatttttatacataaataattcaaaaaatctcaatgaagcttcaaatattggctatctttgcaccctcatttaaagggtaacaagatgaataatatgttgagatacattgtatatatcctattatttctactgtttacgataacagtagatcaggattatcatacggttgagacaacagatttacccccacagacctcttgttaccagcaacaacaagacccctgcaaaagaacagtggacttcctgtttaccaacaattttgcagatatgccacaaatagccatatcacttgacaacccttccacatcaaagttcaaatgtatagtccgcattttagcagcattgaacgaacttaaaaagcaggagctacaaacaaaccatatagtttgccacacttttcattcgctttacaccgatgcagtagattattatatctatgcactccggcggatcatcatttaatttttaatcttttttcagcattttgctgagtagaaatccttataacaaacgtcttataaggaaaatttttctatccgtttgtctaatcaaaaaaagtttagatatgtattttacattattagttgtcgttatcctgacggcaatcgcattagttgccgtagcattgggaattgcccgtgccatttctccccgttcatacaactcacaaaagggagaagcttacgaatgtggtattcctacgcggggacggtcgtggatgcaattcaaagtaggttattatctatttgctatcctcttcctgatgttagatgtggaaacagtatttttatttccctgggctgtagtggtacaagacctaggagtgtacggtctgtttagcatccttttctttttagttatattagttttaggtctggcatatgcctggaagaaaggagcgttggaatggaagtaaagaaaccaaccataaagtctattccttatgaagacttcaaagacaatgagtatttggaaaacatggtcaagcagctcaatgaaggcggtaccaaagtactggtgggctgtttggatgaccttatcaactggggacgcagcaattcgttgtggccgcttacatttgcaaccagttgttgtggaatcgagtttatggcagtgggtgctgcccggtatgatttcgcccgctttgggtttgaagtagcccgtgccagtccgcgccaggcagatatgatcatggtagcaggaactatcacacacaagatggctccggtactaaaacgtttgtatgaccagatggcggatcctaaatacgtcattgcagtaggcggatgcgccattagcggtggtccttttaaaaaatcatatcacgtattgaacggagtagacaaaattcttcccgttgacgtatatattcccggatgtccgccccgacctgaagccttgttgtacggcatgatacaattgcaacgtaaagtaaaactggaaaaattcttcggcggagtgaaccgcaaagaaaatgaaccacaaaatcccgaacaagcatgagtgaaagaatagaaatacctgccgaaaagctacatgaagaaatgctgaaattgcggcagggtaaacatatggattttctacgcagccttaccggaatggactggggcgaagaaggactaggtgtagtctatcatctggaagatacgaatacaagagaaaatataatggtcagcactcgcacaaccaaccgagaaaagccggaacttcctagtgtaagtgatatttggaaaggtgctgaattcaatgaacgcgaagtgtacgactattatggtatccgctttataggacatcctgatatgcgccgtttgttcctgcgtgatgactgggtaggctatccattgcgtaaggactacgatgaaagcctcaacccactccgtatgaccaatgaggaacctgtagacacgacacaatatatagaagtacaacatgatggcagtgtaatagaaaaacgcgaaaccatttttgatgaggacgaatatatcattaacataggtcctcaacatccggcaacccacggtgtacttcgttttcgtgtttcactggaaggtgagattatcaaaaaactggatgtgcactgcggatacatccatcgaggtatcgaaaaaatgtgcgaaagtcttacctatccccaaaccttggccctgaccgaccgtttggattatttaggtgcgcaccaaaaccgccatgctctctgtatgtgcattgaacaggcaatgggcgtagaagtaagcgaacgggtacaatacattcgtaccattatggacgaattgcaacgtatagattctcacttgcttttcttctcctgtctctgtatggatatgggtgccttgaccgcattcttctatggattccgtgatcgtgagaagatattggatatcttcgaagcaactaccggaggacgtttgatacagaattataacaccattggaggagtacaagctgatatcgctccggactttgtacagaaagtaaaagaattcattgcttatctgcgtccgatgctaaaagaataccatgaagtattcaccggaaatgtcattgcccaagaacgtttgaaaggtgtgggagttctttcacgggaagatgccatctctttcggagcgacaggaggtacaggacgcgccagcggttgggcatgcgatgtccgcaagcgtcatccctatgcgatgtatggcaaggtagattttaaagagattgtccacactgaaggtgactgctttgcacgttatatggtccgtatggaagaaatactggaaagtatggatatcattgagcaactgatagacaatattcctgaagggaactatcaggaaaagatgaaaccgattatacgtgtgcccgaagggaattattatgccgcagtggaaggttctcgcggagagttcggtgtttatctggaaagtcgtggagacaaatttccttaccgcatgaaattccgcgctaccggtttgcctttagtatcagcaatggaaactatgtgccgcaacgcaaaaattgccgacttaattgctattggtggaacggtggattatgtagtaccggatattgaccgataataatgtgccgattcttcaatatacaatttggagaatgcactatttatcagactgagaattaacaaattaaataattacaagtttgcctattggcaaattagcaaattgacacattattaaattatgttcgattttagtatagtcacccaatgggtacactcactgctcacgtcatttatgcctgaagaactggcagtgctcatagaatgtatagtaattggcgtatgtatcatgttggcatatgcagttattgctatcattatgattttcatggaacgtaaagtgtgcgccgctttccaatgccgcttggggccaatgcgtgtaggtccccaaggtaccatacaggtgtttgccgatgtattcaagatgttgatcaaggaaattatcaccatccggcatgctgacaagttcctgtacaatttggcaccttacattgttatcctcgcctctatcatggctttcagttgcctacccatcaacaagggcatggaggtccttgatttcaatgtaggtattttcttcttattggcagcatccagtatcggcgtggtaggtattttgctggcaggttggagttccaataacaaatattcattaatcggagccatgcgaagtggcgctcaaatgattagttatgaattatctgtaggattaagcatccttaccattgtaatcttaacagataccatgcaactaagcgaaattgtagaacgccaagctgacggctggttcctttttaaaggacatatacctgcattgatcgcttttatcatttatctgatagccggaaatgcagaagtcaaccgcggcccgtttgacttgcctgaagcagaaagtgaactgactgcgggatatcataccgaatattccggtatgcacttcggcctgttctatgtggcagaatttgtaaacttgtttatcatcgccgcagtagccacaaccatcttcctgggaggatggatgccgctacatattcctgggctagacggattcaatgccatcatggattatatacccggatttatttggttctttggcaagtcattctttgtagtatggttactaatgtggatcaaatggacatttccccgtctgcgtattgaccaaattctaacgctggaatggaagtacttggttccaataggtttgtgcaacctgttgttgatggtaattattgttgtatttaaattacatttctgatgaaagaagaaaaacattcctatataaaagggctgcttcatggcatcggtacattacttaccggcatgaaagtgacaggacgagagttcttcactcctaaagtcactgaacaatatcccgaaaaccgtgccacattaaaaatatcgccccgtttccgaggacggcttatcatgccggttgatgagaatggtaataacaaatgtattgcttgcggactttgccagatggcttgccccaatgatacaatcaccattaccagcgaatctgtgaccaacgaagaaacaggcaagaaaaagaaaatattagtaaagtatgagtacgacctgggagcctgtatgttctgtcaactttgtgtgaacgcttgtccacacgatgccattcggttcgatacagaattcgaaaatgctgtattcgaccgcagcaaactagttctcactctgaacaaaaaataaaaaacaaacgatattatgacactacaactaattgtattcattgtactggcgttgtttatcgctgtctgttcggtattggcagtcacgacctcacgtatcttgcgtgcagcaacttatctgctgttcgttttatttggtacagcaggtatttacttccaactcaactactcattcttgggagctgtacaattactgatttacgccggtggtataacagtgctttatgtatttagtatcttattgacctcttcacagggagacaaagcagagagattaaaaaatggaaagatggtggccggagctatttctactatagcaggactggctatctgtctgttcgtcatgctgaagaacgaattcttgccctctcattttgttcatggtgaactggatgtacgcacgatcggtcatgcactgatgggcatggaaaaatatcaatatatccttcctttcgaagtaatcagcgtgttattactcgcttgcatcgtaggaggaatcctaatcgctagaaaaagatagaacttatggtacacatggaatattatctggtggtttccacctttatgatgtttgcgggaatctatggtttcttcacccgccgcaatttattggccatgctcatcagtgtggaactgatactgaattcggtagacatcaacttcgccgtattcaaccgatacctctttcccgaagaactggaaggcttttttttcgccctgttcgctatcggcgtgagtgcggctgaaacagcagtagctattgctatcattatcaatatttaccgcaatgtacgcaatatccaagtgaagaacttaaatgaaatgaaaaactaattatggaacatacaatactaatccttatcctacctttcctcagtttcctgatactggggctggcaggtatgcgtatgaagaacggattggcagggaccatcggcaccgtttcactggcaggggtgacgttgctttcctacctcactgccttcaattattttgcaggagggcgtacggcagaaggcgtctatcctactctcacaccttataattttgaatggttacctttcacaacgaacctgcatattgacatgggaatcatgcttgaccctatttcagttatgatgctagtcgttatttccaccgtcagtctgatggtacatatctattcattcggatatatgaaaggtgaaaaaggctttcaacgttactacgcatttcttagcctgtttaccatgtccatgctggggctcgtagtagcaactaatattttccagatgtatgtcttttgggaactggtaggtgtttcttcttatctacttatcggcttttattacaccaagaaagaagcgattgctgccagtaaaaaagcatttattgttacccgtttcgctgatttaggctttctgatcggtatcttgatttacggctattatgccgaaacattctcgttcaccccccaacttcaggtacttgcagttgccggaagtatgataccattggccttggggctaatgtttatcggtggtgccggtaaaagtgcgatgtttccattgcacatctggttaccggatgctatggaaggtcctactcctgtcagtgcattaatccatgctgctaccatggtagtagccggtgtatatctggtagcccgtatgttcccgttgtttgtaggatatgcgcccgaagtgctgcactggatagcttatatcggtgcgttcactgcattctacgccgctagtgtggcgtgtgcacaaagcgatatcaaacgtgtgctcgccttctccactatatctcaaattggatttatgattgttgcattaggcgtttgtacttccatgaaccctcatgaaggaggactaggctacatggcatccatgttccacctgttcacacatgccatgttcaaggcattgctgttcttaggagccggatgtatcattcatgccgtacacagtaacgagatgagcgccatgggaggacttcataaattcatgcccgtcacccactggacattcctgattgcttgtctggctatctcgggtatttggccattctcaggttttttctctaaagacgaaattctgactgcctgcttccaattcagtcctgttatgggatggataatgacaggcattgccgccatgacagcattttatatgttccgcctttattattgtattttctggaatggagaatggaaaggacactcccacgaatccggacctgatgcacatactccgcatgaggctccacgtaccatgacattcccgctgatgtttttagccgctatcacctgtattgccggattcatacccttcggcaatctgatcagtagtaacggagaagcctataccattcatctggatatgcagatagctgctacaagtatcattattgctatagcatccatcactttagctacatggatgtatgcaggtaagagacaacccgtagccaactatctggcgcgcacattcccacgtttgcacacagcagcttaccaccgtttctatatggatgagatatggttgttcgtaaccaagaaaatcatcttccggtgcatcagtactccgatagcctggtgggaccggcacgttatcgatcaattctttaacttcactgcgtggagtactcatgctaccgccgatgaaatacgcgacatgcaaagtggaaacgtacagcagtacagtatttggttccttgcaggtgcattgatattgacgctgatactattaatttaatgaataataaaaaatccgccgcatggccattttttaatttttaatttaaaaagatgaacatactaagttttttcattatagttcccttgttgatgctcgcgagcctttgggcttcgcgcagcgtcaatcaagttcgcggagtgatggttgtcggatcttccatattattggcattatccgtttacctcaccattgattatatcgaactacgccaagccggtgctacaggagagatgctgttcacagccagcacagtttggtatgcaccgctccatatatgctactcagtaggagtagacggtatatcagtagcaatgttgctgcttagttccattattgtattcaccggtacttttgcatcgtggaagttacaaccattgacaaaagaatatttcatgtggttcactctattgagtgtaggggtattcggattcttcgtttcaacagacctgttcaccatgttcatgttttatgaagtagccttaattccaatgtatctgctcatcggtgtatggggaagcggacgtaaagaatacgccgccatgaaacttacattaatgttaatgggtggttctgcatttctactgatcggaattctcggtattttttatggtgcaggcggtgaaactatgaacttgctggaaatcgccaaactgcatatacctcatgaaatgcaacgcatcttcttcccgcttatcttcttggggttcggagtcttaggagctttgttccctttccatacatggagtcccgatggtcatgcttctgcaccgactgctgtttctatgcttcacgctggagtattgatgaaactaggaggttacggatgcttccgtgttgctatgtacctgatgcctgaaggtgcagccatgtggggagatgtattcctgatattgaccactatttctgtagtttacggtgcattcagtgctgtggtacaaaccgacttaaaatatatcaatgcctattcctccgtatcccactgcggattagtgctctttgccctgctgatgatgacacgcaccagttgtacgggtgctattctccaaatgttgagtcacggattaatgaccgctttgttcttcgcccttattggtatgatatacggacgtacccacacccgtgatgtccgattaatgggaggtttgatgaagattatgccttttctggctgtaggttatgttattgccggtcttgctaacttgggacttccgggactaagtggttttgttgctgaaatgacggtctttgtaggttctttccaaaatgatgatacattccatcgcgtatgtaccctagtggcaacaacaagtatcgtcattaccgcagtctatatcctgcgtgtagtaggtaaaattctttatggcaaagttttgaatcccgaacatctgaaactcacagacgcaacctgggatgaacgagtagccgttatctgcctcatcgcctgtgtagcaggtttaggaatggctccattctggataagcgatctgatcagtaacagtgtagaaccaatcataagtcaattattaaattaaaatttgagaattaaaaattaaaaaatagcaatgatggacataacagcaatactccatatgcatgccgaactgagtctgacagccgtttttattctgatgtttctgttagatttatttttaccggcaacacaacgtcactggttacgccccatggcatgtatcctgctgaccattcaactcttagcaaacctatggccggaagaggtgactttatttggcggcatgtatcactcaacccctatggcgtctgttctgaaaagcatcctgaccataggtaccatactggtgtttctgcaagcagacacttggctaaaacgtgaagacacccgtcataaacaaggcgaattctacatccttaccctcagtaccttgctgggtatgtatttcatggtaagcgcagggcacttcctgctattcttccttggattggaattggcaaccgttcctatggcttgtctcgtagctttcgataaatataaagggcatagtgccgaagccggagctaaattcattctttcggctttattctccagcggtattttcctctatggcatttctatgatttatgggacagcaggtactttatattttgaagatatccctgccggactgacaggaactccattacaagttcttgcactagtatttttcttctccggactggccttcaaattaagcttggtaccttttcatctgtggacagcagatacttatcaaggtgcaccgactacagtaagcgcctacctatccgttatttcaaaaggcgcagctgcttttgctttaatgattattttaatgaaagtattcggaccaatgactgaacaatggagtgaaatactatgtattatcattgtagccaccatcactatagccaatctgttcgccatccgccaaaacaacctgaaacgctttatggccttcagcagtatttcacaagccggttacataatgttggctgtactggctggaactccgcagggcatggcatccctagtatattatatagtagtatacattgccgccaatctcgccgtattcggtgtcatcaataccattgagcaacatacccacggtaaaatagagcgcgaagattataacggactttataagaccaaccccaaactaactatggtcatgacacttgctcttttctcattggcaggtatcccgccatttgccggattcttcagtaagttctttgtattcatggcagcattccatagcggatattatcttattgtatttatcgcattggtcaatacaatcatttcattgtattattacttattgattgtaaaagccatgttcatcacacctaatgaagaccctatcggcaattttcgtacagcaactccgatgcgcatcagtctgttggtatgtgtagccggcatattcgttttaggaattataagtggggtatatcaactattaagtgatacagcaatactataaaagttcagttacaaaaagaagaataataactgaaatgattattgtatttctatgatcaatattcttttactttggaagcagaatcaatctgttttcaaagtaaaagaataccttaaagtttctcttcaacaaatttatcattatcttcgtagcaaattataaaaaaataagtactatgaagaaagtcctctatattacaatactcgcttgctctactttatggggatcttgcacagagaaaaataaacaatccgccagaacagattcctttatagaaaaaaatgtagcatttgcacgtgcacaaatcggaaatgaaatacaaattatagaaaaatcagagaaatttataaaccctgtgacactgaaaactgacagtaccatttattattgtgactacgccgactggcgaagtggttttttccctgggtcagtgtggtatctatatgagttaagtggcgacactactctcttatcattagctgataaatacacttcggccatagaagaagccaaaaaactgacttggcaccatgatgtaggtttcatgataaattgtagtttcggcaatggatggcgaacaactaaagtacccaaatacaaagaagtcatgatagaagctgcacgttcattagctactcgtttccgtgaaaagccgggaattatccaatcatgggatgtgacccgcggctggcaatcggaacgcggttgggaatgtccggtcataatagataatatgatgaatttagagttactatttgaagcaactaaattatctggtgattccaccttttatcatatagcagtgaaccatgcagaccgcactttgaaagagcatttccgtacaaacggaagttgttatcatgtaatagattatagtttggcagacggcatggtacggcatagacaaacagcccaaggatatgcagacgaatcgacttggagtcgtggacaagcatgggcgatttatggttacactgtgtgttaccgggaaactcatgataaaaagtatctgaatcaggcattgaagactttccaatttatgaaaacacatccccggcttcccaaagacttgattccttattgggatatggatgctcccaatattcccaatgaaccacgagacgcttcaagtgcttcttgtatagcttctgcactttatgaaattagtacaatggatgtgcctgatgcaaacagttataagaactatgcagacagtattatggcctctctagcctcaccaaactatctggcatctcttggaaaaaatggtaactttttattaatgcattcagtgggcagtattcctcatggcacagaaatagatgtacctttaaattatgcagactattatttcctggaagcattgaaacgaaagcgtgacattgaagaaggcacacactaagttatacagacaaacacagaaatatttcctcccgttcttcgggaggaatgccacagccggtatcggttacttcaattcgtaacttactttgtgccttatccaactttattttaagagttacagatccagaatctgtaaatttattagtattatcaaacaggctctctatcactagcgacaaatgcaattcattggtggagataaacatttccccttttggtaatttcaccaatacaagtaccataaaaagtctaattactaaaaaactcctgttctttgtttccaaacggtaattttcatagttcaattgatctactccatactttacaggtagttcactaaattattttttcagactagaagaattaatggaatcctgcgcttgtatatcttataatattcagaagactatctttggtagtagaaatactacctcctatcacgacaagaattccccaacagatatcaatatatacaagtgatgtatttcataatatcagattattaaggtacgaatatacaaataatataaaaatgtagcagcagttattcctctattattagaatttacacaataatgggcaattaatccacttattttctaattatatgctttaatattgcatcgtagatattttttggtaactatgaaattattaattattaaacatcaaagatatggtaaaaaagttagttagtgtactttgtatatgtgcatattttggacttgctcatgcacaaataccacaagagatttggaaagaaagtgagcaaatagaaaaacaaatcaaaaagacttcttttcccgatcgtgtgtacaacattaaagatttcggtgccaaagaaggaaataatggtgaaatactctgccatgaagcaatcaatctagctatcctcacatgcagccagacaggtggaggaactgtattagttccacccggagaatttctaacaggtcctatcacactgaaaagtaatgtaaatctgcatttggaagaaggtgcctatctaaaattttcttcagagaaatatctatatactccaaccgtactcactcgctgggaaggagtagactgttacaatttgcatccattaatttatgcttatggtgaaagcaacataggcattaccggtaaaggtattatagacggacaggccagtaatgataactggtggagtatgtgtggtgctccacactatggctggaaggaaggtatgacagctcaaaaaaatggcggcagagacaaattactgatgtacgccgaaacatttgccccgatagataagcgccaaatgacttttgaagacggtttacgtccccaacttatcaatctatatcgttgcaacactattttaatagaaaatgtaacattgaaaaattctccgttttgggttatccatcctttattttgtgaaagtctgacagtgcgtggggttaaagtttccagtcacggtcccaatagcgatggctgcgatccggaatcaagtaagaacgtattaattgaaaactgtatattcgatactggagacgactgcattgccattaaaagcggacggaatgccgacggacggaaatggaatgtaccaagtgaaaatatcattgtacgcaattgcgaaatgaaagacggacacggtggtgtagttgtaggcagtgagatttcgggaggatataagaacctgtttgttgaaaactgcaaaatggacagcccgaacctggaacgtgtcatccgcatcaaaaccaacaactgccgtggtggtgtcattgaaaatatttatgtgcgtaatgtagaagtaggtgaatgtcgcgaagccgttttgaaaatcaacctgcaatatgaaaaccgtgaaaaatgtgacagaaatttcccacctgtagtacgccatgtatatctggataatgttaccagtgaaaaaagtaagtacggagtcttgattaccggatatgacgaccgtgtcaatattgaagacatccatgtaacaaacagccgtttcaataatgtagagaaaaagggaaatttaattaccggagctaaggatgtagtactgaaagaactgtatatcaatggaaataaggtaagaaaataagataaaaaatctttggtataatgagatgccatcataccaaagattatatcctcttttgagaacctattccagacactcatcaagttcacgtatcaactcttctttatcaagatgtcgcccgataaaaactattttctgcatacgatctccatatttatcatcccaatcccgcaataagcccggctcctgacgtattacctctatcagttcttcttcaggtgccgtagcataccataaaccggcttccttcaactttttctgcacaccggcctgttcaaaaagaaaagacatatcacgattattgctgaaataacagactccttttgctcgaataatattacgactccactgggtggatacaaaacgatcaaatttatggatatcaaaagccggacgacgataatacacaaaagtactgatgccatattcatccacttcactaccttcatgatgatgatggtgtgcatgctcctcatcgtgatgatgatgctcatgctcctccgcttcttttttctgctcttccgtaagggcactctctattccacgtatccaaccggcagaagtggcagtacgttcaaagtcaaatgcttcagtatagattatcttatccaaatctgcatcagcataatcacattctattatttcagctgcaggttgcaatgtacggataatctgtttgatacgttccaattcgtcacgtttcacttccgaggccttattcaacaatacaacattacaaaattcaatctgttggataatcaaattttcaatatcctcttcgtcaatacccttacaggtcaaatcgttgccacaagaaaactcactttgcagacgcaaggcatctaccacagtcacaatacaatccaaacgacatcccccgtacgtattccccatacttgaaatagaacaaatagtctgtgcgataggagctggttcacaaaccccacttgcctcaatcacaatgtaatcaaaacgctcctgcttcataatatcatctatctgctccaccaaatccatcttcaaagtacaacagatacaaccgttctgaagtgctaccaagctttcgtctttctttcctacaatcccccccttctgtatgaggtcggcatcaatattcacctcaccgatatcattgacaataaccgcaaacttaataccacgtttattagaaagaatatggttcactaatgtcgtttttccactgcccagataaccggtcaaaagcagtataggaatttcttttactctcatataaaattcaatattactttcacaaaggtatagaatgattaatttccaaacaatagaaaacatctttttataccttataaacaaaaaagactctttacatacccccagttagaatccattaaaactcaattcacagtgcaacatttttcaaaaaatgctttaaatattccaagagtataactatatttcgcaaaacaaatttataataacaatgagaaacaaattagcacaaaaaatcaaattaggcgcagccttgttattgatggcgggaacttcagccttcgcacaaacctccaatcaaatttatacacctactcctgaaaatataaaagcacggcaggaatttcaagataataaattcggtatattccttcattggggcatttacagtatgaccgcccaaggagaatggtatatgaacactcacaacatcaaccgtaatgaatacgccaaactggcatccggattctatccttcgcgcttcgatgctgccgaatgggtttccgccatcaaaacctccggagccaaatatatctgtattaccagtagacaccatgacagtttctcaatgtttgatacaaaagaatccgattttaatatcgtagatgccacccctttcaaacgagacatactaaaagaactggcagaagaatgtcaaaaacaaggcatcaaactccatttttattattcgcatttggattggtttcgtgacgactatccggaaggaaacaccggacatggaacaggacgtcccaaaggacatggaaactgggcaagttactacaagtttatgaataaacagctgaccgaacttttgactaactatggtcctgtcggtgccatttggtttgatggtatttgggatcaacctaccaacttcaattggcaactggaagaacaatacgcattaattcataaactgcaaccatcctgtctaataggtaacaatcatcaccgaactccttatgcaggagaagatttccaaatgttcgaacgtgatttgcccggtgaaaacaaagccggtttttcagcaggacaaggaataagtgaactccctttagaaacttgtgaaacaatgaacggaatgtggggctacagaattgaagaccaaaattacaaatcccctaaagaattgatacactatttggttaaggcagctggaaaaaatgcaaatttgctaatgaatattggacctcaacccaacggagaattaccagctacagctgtagagcatctaaaacaggtgggtaaatggatgaatcaatatggagaaacgatttatggaacccgtggtggtgatgtagttcctcatacatggggggtatcaactcgcaaaggtgaccgtttattcatccatatactagatttgcaggatgatgcactttatatacctctgaaggcaaaagtaaagaaagcaatacagttcatttccaaaactccactttctttcaaacaggagaaagacggcatatttataaaactgcctcaagtacctgatgacatagattatgtaatagaattagtcattaaacaataaaatagcattcatctttaaacaagtgtctttacgtgaaaaacaagaatatctttagaaaaagagagaaaatgtattctacaaaaatcagaaaagaaacatgagtaagctacatacattactcttctaaaaaagaattcgtccttggattatgaaaacccaaggacgaatcactcttagtttgtggagctggagggtgtctctcgaacctttttataaaatttcacaggatatcaaatatcatgtaatcagttatttatctctttctttcattaatctaaatatctcttaatatcattgtatatctcatttttcgggtgtatttttgggtgtcattttcaaacacacccaattatgaatattaaaagaaatatcattttcgcaccggaaagccgcaaaaaagacggtattccagtcacaaagaatgtgccaatccgtatgcgtgttatctttgccagtcagcgtatcgaatttactacgggatatagaatcgatgtagaaaaatgggacacagacaagcaacgggttagaaacggttgtaccaacaagctaaagcaaagtgcatccgaaatcaacgccgaactattacggcaatacaccgaaatacagaatgtgttcaaagaattcgaggtgcaagatgtaatacccacccctgcacaaattaaggaagcgttcaacctaaagacaaaaggggaaaagaaagaaaaccatgaggaaaagcaaaaggttgaattagacttcatgaaagttttcaatgaatttgtagcagaatgtagcaaacaaaatgactggtcttcctcaaccctcaaaaagtttgcaacagtcaaaaaacacatttatacatttgaccctaatactacgtttgacagttggacggaaaaacatttcaatgactatatagaattcttgcgtacagaaaaaaacatgcgcaacacttccattgccaaacaaatcaaattcgtaaaatggttcttacgttggagtaatcgaaaagggtatcaccaaaacatggcttatgataaattcacgcctaaaatgaagagtgcacccaaaaaagtgatatttctcacccaaaatgaaataaataaactaagaacctgcccaataccaccaacaaagaaataccttgaaagagtaagggatgtattgctattttgctgtttcaccggattacgtcactccgatgtgtataatttgaaacgtagtgatgttaaaaacggtcatatcgaagttattaccataaagacggcagacagtcttattattgaattaaatgaccacagcaaggcaatactcgaaaagtacaaaggtgtgccgttccctaatgacagggcattgccagttgtaagcaatcaaaggatgaacgaatttttaaaagaactgggacaactggcagaaatagatgaaccaatacgagaaacatattatagaggaaatgaacgaatagacgaagttacacctaaatacgcattattaagtactcacaccggaagacgaacatttatctgtaatgctttggcacttggcattccagtacaagtagtaatgaaatggacgggacacagcgattacaaagcgatgaagccctatattgatatagcggatgaaatcaaaatcaacgctatgactaaatttaatctgatataactatggacgaaagaataacatcaatgataccccactacgggaaactcaacaagatatataccgaaataatgtccggcggcagtttctcttttgagaagcagcaattcatttccggcttttacggagagtacggggacacgcagacatttgaaaccgcactcatcagcctcatgcttgaaatggacgccgcacacttctccatattgctgaacagcctgaaacgtgagattgaaagcaacatctcgacttacaacgcctgcagggagtttttcgaccgtctcgataccgaatacgtctgccgacggcatgaaagccgttttgactgggacatcgacagacagatgaaagtcacaaacggatattaccgggaactcatggaagccaacggctctttggaagcggtaggcttcagggagcatgaccgtcaggaagaggaactgctggaaagaaggtacgaacggtgcaagcgggaatacgacaaggaaaaagccaaactggatgaactgtacaaacagaaggagcaggcaaggcgggaagccctgcaatgcctgaaaaaccgttgcggggacatttgcagactgggcggctcactattggcaatccttgaaaaatacctgaccgaccaaaagaaaaaggagggagaggaaaaggaagccgccaccacaccgacaagccaacccgcctacttccccatgaaacttttgtcagccgtttacgaaagatgcaacggtgagcagttcgaagccgtttcagaactggacttctacgccagcatgaacctgcaaccatgcgaaggcagactgaaaataagaccgagggagaaagcccgtgtatgctatctcattttccttatgggtgaaacgctgcccaagccggacagagaaaaatggaaaggggacatcatgaacctgctgggaatagacgatgcatactacaagtcaaaatacaaagagcccgtttccgatttccccagtgacagcaatcaggtatttgcaaaggaaatgcggtcaatattccgatagtcggtgatatgtcccgacactccacgacacgaccacttttaccactcaaaataatttccgccaccctttattatcttctgatatttagtgagatagcgtgaaaccacaatcacgctatccacatccttaccacccgtacccggaactaactttgcactgttcgaacgaggtaaaaagcccatgcgcagggcttgcagtacaaacgttaattcattctgatatggaaattagagaccttttatcaaagcccgtatggcagatgacgggcgaagagttcatattcctgaaccgccatgccttgcaaggaagcgaaacgaagccagcccagccagcagccgacaaggacaagaaatacgtgtacgggataggcggcatagcccggctgttcgggtgcagcatacccacagcaaaccgcatcaagaaaagcgggaggatagacagagccattacgcagataggacgaaaaatcatcgtcgatgcggacatggcgcttgaactggcaggacacaaaagcgggggacgcagatagggaggtgcgatatggacaacaaggaaagaaacatcacgcccgaagaggcggtaatcctatggcaagcctcacggctcgacctttcggaagactacgagaaggcacccgaaattctgaaagtgcgaggctccgtcatcggtacgctggggaatttcagcgcgtcaatcggaaaagccaagagcaagaagacgttcaacgtctccgcaatcgtggcggctgcgctgaaaaacgggacggtactaagctacacggctgaactgcccgaaaacaagcggaaaatactctatgtggacaccgagcaaagcacctaccactgcgcaaaggtggcaaaacggatattgcgcatggcgggactgcccgcagacagaaaccatgaagaccttgaattcctcgtcctaaggaagtacacgcccgaagagcgcatagcaatcgtgagggaggcaatctaccgcaccgagaatatcgggctggtagtcattgacggaatacgggacatggtgcatgacatcaacaaccccggtgagtccacaacggtaatctcctatctgatgacatggacgggggaaagggacatccacatccatactgtcctgcaccagaacaagggggacgagaatgcaaggggtcacataggaaccgagctaagcaacaaggcggaaacggtgctgcaagtggagaaggacgagaataaccccgacataagcaaggtcaaagccgcacacatcagggcggtggacttcgagccgttcgcattccgtatcaatggggaggcactgcccgaactactggacggctaccggttcaaggagaaggagccgggcaaagggaggaggggaaaattcgaccccaacaaggacatcagcgagcagcagcaccgcatcgcactggaagccgcattcaccctgaaagacgaatacggctacaaggaacttgcgggagtattgagggatgcctacgcctctgtgggcgtcatacttggcggaaacagggtgacagacctcattaccctattgaagaacaaacggatgatagtgcaggagaacggcaggaaatacaccttcaagcccgatttccactattagcggtatggcatgggaaccactttactttagtcacgtaccatatatatacggaaataaagtaaagtggatatagcccgtaacatatagagaggtacgggcgaaaacaaaaaaagatgttcacaccgcctgacaagaaaaacagcacgggcatgacagcccggaaccgctttactttagtcagggtgcatatatatagcgaaataaagtaaagcggatgcagcccgcagcatgcagaaggtacgggcgaaaacaaaaaacaatatccacttaaacagaaacccacatgaatacgaatgaagcgaagcggatacgcatagaggaatatctgcacagtcttggctacagcccggtaagacggcagggcaatagcctatggtacaagtcacctttcagggacgagtgcgaaccgtccttcaaggtgaacaccgagcgcaacctatggtacgattttggcgcgagcaagggcggcaacatcatcgcactggcgcaggagctctacgcatccgacagcctgccctacctcttggaaaagatagcggagcaggcaccaaacgtgcgcccggtctccttctcttttggcgggcaacctttctccaaaccgagcttccgacagttggaggcggtgccgctttcttcccccgccctattctcctatctgcggcagagggggataaatacggaactggcaaaaagagaatgttgcgaggtgcgctatcaaactgacggcaagccttactttgccgtcggttttcccaaccgttcgggaggctacgagatacgcaacaagttcttcaagggctgcatagcaccgaaggacatcacccacatacggcaggaacagacgaaggagacctgctacctcttcgagggcttcatggactacctctccttcctcaccctgcggctggaaaggtgtcccggacgccccgaacttgacgggcaggactacattgtgctgaactcgactgccagcctctccaaagcaatccacccactgggcgattacgaacacatccattgtttccttgacaacgacaaggcgggaatggaagccgttcaggaactgcgggaggaatacgggatgcgcatacgggacgcatcgcacatatacggaggctacaacgacctgaacgacttcctttgtggtaaacggtcaggacaagcggaacggtggcaggagaagccggaaccggagaaaaggcaacggcaggcaaggcaaccggagaggaaaggcaaaggcatcgggatgtaaccgcacatgccaacggaaggctttaaaaaagccatagctcattagggctttttcttcacgcaatgcacgcatcgctaaaaaagccccaatgagcaaaagggacgccgccccttttgaaaccccgtgagccatgcggcatggaagcaaggcaggggaagtattaaccgaaaaatgtattacagttatgggatatgcagttttgcatttggaaaaggcaaaaggtgcggacggcgcaatgtccacgcacatagagcgcaccgtacacccgaagaatgcggacagaacgcgaacgcacctgaaccgggaactggtacagttccccgaaggggtaaggaaccgtacgcaggcgatagcgcaccggatagagacggcaggcatcaaacgcaagataggtaccaaccaggtaagggcaatccgggtgctgctcaccggaagcaacgaggacatgaagcgtatggaagaggacgggaggcttgacggctggtgcagcgacaacctgaaatggctccgggaaacatacggcgagcggaacctcgtgtcggcagtcctgcacatggacgagaagacgccgcacatacacgccaccattgtaccgatagtgaccggggagcgcaggaaagccagacaagacgaacagaacgggaagaagaagtacagaaagaagaacacgcaggatgtgcggctgtgcgccgatgacgtcatggcaaggcacaagctgaaacactatcaggacacctacgcacaagccatgagcaagtacggcttgcagagaggcgtggacggttcgctggcaaagcacataccgacctcgcaatattacaaggaactggtggaacggcaggacagcctgcaggagaacatcgaaaacctgctggggctggaagaggaagcgcagaagaagctgaaaaaggtcaagggggaaatcaacgtgcagaagatgaagggtgcggcggtgaacgcaaccacagccatagcggacggggtgagttctcttttgggcggcagcaaggtcaagaggctggaagcggagaacgaaaatttgaggcaggacattgtggctctgcaaaagcaggtacaagccgaacagagggagcagacaaaaatggagaaccgccacaacagcgagataaacaagatagaccggagctaccagcaaaaaatcagggaatacgacaacagactggaacagatagacacctatttccctatcgtgaaggaactgttgcccataaccgaacaatgccgggaagtggggtttaccgaggaactgacaaggcgggttgtcagcctgcaacccgtggagttcaagggaaggctctattcgaaggaacacaaggagaagttcagaacggagcactcgacggcaaccgtggagaggaacccgcaggagaaagggaaattccggctgtgcattgacggcatgcccatactcgaatggttcaaaatgaagtttcaggaactcaaagaaaagctgggtgtaagccacaccccaaaagaagagaacaaaccgaaaagagggttgagattgtaaaacgtaataaaaaataggggctttggtttcatttatttagctgttttttgtatttttgtattggattgagtatgctctttccaagacatattagaatttttagaagcgttatgcttatcttgtagatgaaaacgtaggaaattttcaaagagtacaaggatagcatagtggttctcacgctatagcgtgggctgctatatccatatctgtactcaaggtattttcctacgaccttcatctaagacgtggcatgcagacccacgcttctttttgtataactctgcttagtggggtctcaggcggctatatatgaaaccaacaacatgatttcacaagatgaattttctttatttgaccctcaaaaaatgagagcttcagtcttacctgacaagcccggtaactatatcatagtattacgtagtacgtcctcattgcccataaaagtacaaatttccaccactcctatactaacctcttttgattacaaaaaagagaaatacaatgtcgtgtatgtaggcaaaagcagtaaaagtctgcgtattcgtgactacaaacaacatttcactggcactgccggaaattccacaattcgcaaatcattaggatgtttattgggattcaaactgattccaagagacataaactctccccaaaacggaaaaactacatttggtgaatttgacgagcgtacactgaccgaatggatgaaagacaacctgctacttttttattatgcaaataatgattatgcaaatgttgaaaaagaattgattcgcatatataatcccccgcttaacttgcaaggaaatttcaataaaactaatcttgatttccgcaaggagctttctgcgcttcgttcatgcacttcggcgaaacaagccccaataccaaataaccaattaaaactaaatacctatccacaacaattgcaatgcagcaattgtggtataaatctaacaattgatgaagggttaaaaaataagaagtacattaaatgcctttcttgtggttgtattattcaaaatcccatctacatacaaaataaaaaaaataaagaacgccgacaatggatagcggtattgatttttcttgttgtggttataattttcaatatttcaagtagagaatacagcacttcttcaaagggtaacaatagaatcgaaaactacgggagcaacaaaggaccatctcaaacaaaagctatggcaggagtaagggtctatcttaaacggcattatcttaaagaccctgatagttatgaaggaataagttgggaagcctttggtatatataataaagacaataatacttattttgctcttcataaatatagggctaaaaacagttatggcggttacgtggtggaagagaaactttttgtattggattctgacgggaatgttataaaagttgtagatgacatgaatgaagtcattaatggttattgatataaacaatgaacaaacaatgaagttatgaaggagcaaaatactgaaagactttctgaatatgagaaagcccaaatagagtttgcaaaaggtaaagcggagtttctacaaggatgtggcggttgcctgatgatcccaatcatcattatcattctactttgtatagtaattttaataggtctaatcgcttctccttttatggattaatcaaaaaatttaattctaacttaaataatatggcattatgaaaaaaattattacttctattttcattttgatgttttatcttggttgttcaccaccacagaaggatgtactgtttgcaaacgcttccgatgaacaaatcatagaatggggtaaacaatacgtagtccattccattgaggatagtttaaaagaaggagaaagttacaaaataatggaatggattttggcagaaaaaaagacaagtattcccgttgaggtatggcaaatggataatacatataaaaaagattcaatatcaggatgcgtcaagctattagatacacgaggtattttcgatgaactcgcatttataggaaatggtgatagcgcatttgtagccttcgctgttgcatatacaatagatgaaaagaatgggaatagttcattcttagaaaaagtttttaccctcgataaaagtggtaaagtgttggattgtagcgattacctcagcccttctcaaaagagaaaacaaatagaagaaaattttaacagagctttggaacagatgggtcctattctgattcagacggtaaaggaaggtgcagctatggctggtaaagatacaagcaatgtaacaagtataacgattaatggaaagacatattccgaataatttataatattacgtattatgaagacaaatgaacgtattttaagaatcaacagtgtgttgcgagattattttgcgaaacatcctcaaagcggaatgatccttgcaaaagagtttatgcctctttttataaagaatggcattttcaataaagataatagagaggggttacccattcgaaaagttctgcgagatttggatactgaaaattcattggacaaaattccctatgttcatactgaaaggaaacctaaaacaatcaattggtattttcgtcctttgcttttatcgcttgtaatatttatgggtatgctttcgagttgttcttttaagtcaaataccgatttcccaaaagtgacccatgtagctttccaaaaagaaaaacatgggaaatggggtatggttggagttgatggaaacatcttgtttgaaaataaatttgacaaaagaccgtcttatgcagtaaatggagtgtttagaattcgggattatgatacaaatcaatatctttactattccgcaactccaactccccaattaataggaactcccaaaggttataagcaaggaggcatatgtagcgaaggaataattcctgttgtttctgcggatgaacgtattcactatctaacagaaacgggagaaactgcattttatttgcttccgtatcagggaaaggaattcttatgtgtatctccattctttacggagcaacgtgcttggtttcggttagaaaatcgtaaatgcggatatatagatccacaaggcaatgttgtgatagaacctatttatgataacgctttccctttccatgaaggaaaagctattgtatataacaaagaagctgacaaatggttagttatcgaccccaatggaaaagaattatttgaagccagttccaatggataccaacaatattcatacaccttttttgaaaacggatattgtttaatagaaaacttcttactcaatgaaaaaggcgaaaaagcacagagattcccctctaatatttatagtatttcacctttcattgacaatgttgctttatttcaagacagtaaaactggattatggggacagcttaacatacaaggagaaagtatcggagagcctaaatattcgcgagctttaggtattgtaggtgattggatatatgttgctgatacaattgctaatttaaaagatgactgggataatcaatatatgaatgtatatgcaataaattctaaaggtgaaattaaaaataaaatagaaaacgtttcatgtttttacccattatcccaatatatcataatggcagaaaatgagaaatattactttgctgacaaaaaagggaatccaatagacaacaactcttattacaaaatttcagttcccccatttacaaatgcccccagttactcatccttttggtcttctttaatagcacctcactccttgtctgattatgatgcttggggagttgcaaccaattatatagatgaaaagaaaacattggcatcaatattcgataaattaacatccgacggcattgacagcttaaaaattggtcaaaccattccaaaaattatggatttatacaatataaaacaaatgccaacaagtggaatgattgacttgcataatagagattggggcataaatcaggtttttgcaacgtattccgttggcattcttcatgaatgtgagtgtgtaattgtgattaaagtaaagattgatgcgagtgcttctccgataggtgataatccaaagaaattgtttgatgctataccacaatatcttacagaaactttgggattaaaaagggaagatgaaaccctttatcgatctgaagatgcttgttatgatattgtttattatgaaggagaggattcattctttttaatgtctaaagcgataacagagaaatagttaagaaacattcatataaatcgaacacttaaaaatattcccgtacagaacatcaaattctgtacgggaatacttttatacataaaaaataattatctaagtattgtggacctggggagaatcgaactcccgtccaaacgaggaaaccatatgctttctacatgcttatctttgcctaaaattttcgaacataagcaagaccaaagccaccaacttatgccttatcctctaaaatttcgtaagagttacgaggaaaaactcaaactattcccgattttactgtgccactttatcaaacgcttcggaacaagagcttttgagtgacatctcgtttctaccactttggcggaaataaagctaatctactatacttcgattaagcagcgagagcataattttcgttgccagataaaattttgataactgatatttaagtggaaattaccgacccactgcatgcttacataccattccaactcgctgtcaattccagtcaagccctaatgatgtttcaaagataggaaatcgccttgataagaacaaacaaaatgataaaaattaaaatagaatatcacaaatcatcacaatagttaatttatttaagaaaggcagatagcttttgatataaagaatgataatcagactatcatttttatttcagggtgcattttggggtgtaaacaatataaacacctgattatcaatattgtttatggagctggagggagtcgaaccctcgtccaaacgaggaagccatacgctttctacatgcttatcttcgcctaaattttcgagtataagcaggaccgaagccaccaacttataccttatcctctaaattttcgtaagagacacgaggcggatctctaactattcccgattttactgcaccacttgatcaaacgcttcggaacaagagcttttgagtgatgtctcgtttccaccactttggcagaaataaagctaatctactatgattcgattaagcagcaagagcataattttcgttgccagataaaattttgaaaactgggattatagtgccaatcaaccacgcactgcatgcttacataccacttagccacgctgtcaaatccagtcaaccccgtactggtaactcataaagagattacaaatatacacacacttctgttaatatccaattatttattcatttatttatagcattttaatgagaacaatgtatctttgaaaataatttttctaatcctaacagatcagacaatatgaacaaaaaattaatggtattgtgtatgagcagtatgatactgggaggctgtataccctctcccaagaaacaaacggaagcaattacagttgaagaaaatccgaatatgatgtatatgttggtaggcagttatgcaactccggaggaagaaggtatcaaggtttataactttgatgaacaaaatggcaactcacaatatatcagcggaataaaaggaatatccaacccatctttcctcattccttcggctgatggagaaagaatatatgctgtaggggaggattccggaaaaagttctaccgccaatgccatcaaattcgataaagaacaaaagaaactaactttgcttaattctcaacccactgacggcggtgcaccttgttatataactctcagcccgtcggaaaaatttgtcctgacagcaaattatataggaggtagcattaccgttttcccactagataaagacggcaaattaaaatccgaaacacgccttatttcctttacaggaaatagtcttgacaaagagagacaaacacagccacatttacattgtatagaattcactccagaccataaatatctacttgccagtgatttaggaacagaccagattcatgtatttcctgttagtgagaatgtaactgatggtgtatcccattccttgctgaatgaatccgaagaatttaatataaaagtagaatcaggatcaggaccacgccacatttgtttccatccgaaccaaaaattcgcttatctgattaatgaaatctcaggaaaagttatagctttctcttacgacaaaggaaaattaaacgccatacaatatatagaagctgacacagtgggtgccaaaggtagcggagatattcacatttcacctgatggaaaatttctatatgcatccaaccgcttaaaagcagacggtatcgctattttctccataaatcaggaagaaggaacattaacaaagacaggttatcagctgactggtatccatccacgtaattttattatcagccggaacggacgatacctgttagtggcctgcagagacagcaactccatacaagtatttgaaagagattcccaaacaggactactgaaagacacaggcaaaacaataaaaaccaataaacctgtatgcctgaagtttaccttttaaacagggaacattgtttttaataaaataaactgctgctttcgttgtatgtattggaaacagcagtttattttatcaaaaacaaaacgaatctttatacataagtttccaagaacttaacatgaccttccacagtcactttcacctcttttgttgtggcagggaaaaggatagattcaccggcttgcaattccaatgagttaccatccccatcagttaccgtacatgtaccttccatgcaaatataaattacaaacgaatcaagttcactataatctatcgtcatattttcagtcaaatcataaacagaagtagtgaaatacggacaggtaaccaactcgacagattcattctgtttcggagtataatgagtacgataatcctcttctacagaataatctatggcatcttttgacaattctgtatgcaactcacgagtattgccatttttatccttacgattgaaatcataaattcgataagtcacattcgaggtctgctgaatctcagcaataaagcatccggctccaatactatggatacgtcctgcaggcaagaaaaacacatcacccggttgtacggcataatcagccaatgcatcacaaatagtattatcagcaatcattgcagcatattcatcgggagtaatttttttacttaatcccgaacgcagatgtgctttccccccggcattgtcaataacataccacatttcggtcttgcccatcgaattatgacgcttctttgccagttcatcatccggatgcacttgtatagagaggtcgtcacaagcatcaatgaatttgatcaacaagggaaaattatcgccaaaacgctgataattactttctcctaccaaagaacctttatattcttttaccaactggctcaaatttttgccggcttgagttccattagcaacaacagactcatcgcctgggacattagaaatttcccaactttcgccaacctgaggctgttcaatattcagatgtttgaacggaataatcttttctccaccccaaatggtggatttcagaatggggttaaatttaaatggatacataggtgtattaattaatagtttctaggtttggatacaaaaataagggaattctatgactttaccgcatagaatcccctaaaattaacagctatgtgtgtatattcaaaggtgtattagtagtctgtattattaggatcgaaattagtccagccatccaaccaattatcatctgttccaaacgctccgatatattctactgtctcaaaaccgctgctcaacagtgcgtcattaaatgaagcggctgtcaacacagggctatctgcatccggcatataattaacaccgatattacgcccgtccttgaatttcaactcattgacatcagtcaatactttatttcctttctgagtcttgaaaaaagtagaagaataagactcttgtccagcatcaatgatttgcttgttcacggcatcataaagcacatcatcatatactttgttagcatcagaaccgaccaccgtcatacctgcaaaccaaatattctccaactttatgtttcctgccttcgccatctcaactgtattacctttctcaccatcaataattaaaccgacaggataccctacagctactgaattaaagcaattcaaacgactggaacgccggatctgcatagcagactgaaacttacctaaagctgaaccattattaggattgaagctaccgcccgtaatatagctctcattattaacaaagttggcatcacgccccaacggtccgataaaagtgacattactaaatacggctgtcgtatagggttctatcaatgaggcgtctccacaattatccgactcaaaaccattagactgagaagtatctgcgattctcggatcacggattgaaagacaatattggaccttaccggagaagccattatctgtatcaaactcatcgtcccatccattataagccactagatatttacaatttacattacctccaaaccattcgtaagagtcgtcattggaatatgaaacctgtaaatgatcaatggtagttccactacctacagatccaaaagttataccattaatttccttatctttttgaaaaggataaccagcaaattccacacgtacatatctcaatatacctgaattgtcagcatcatcatttcctccatgtttagtacgtggacctccttcaatctgctggttcaacactccctgattattcttggcattaccacaaataatcaatcccccccaatctcccggtttacgctggcctttaggctgttcagaggtaaaaacaatcggagcgtctttagtaccctcggctattagtttgccgcccggttctacaatcaaggcagcctgtgtatctttatcccctttgataacagtccccggttcgatggtcaataccgacccagttcccacataaatccatcctttcatcaggtaagttcctttggacaaagtctgtgtacccttaaaaataaactcctgatctccatttcctatcacggtacctttggcattctctgttttatcatcatcaaataacaagtggtcacatgttttaatagccccctcagccccccatacataaggagcttcggcatttccaccgttgccattaccgtttcctgtatcagtttccggatcatcactgctacaagcaaccattccccccagcattattgctgagaatacgtaaatcataaacttgtcagttctcatttccatttgtttattggttaataatgaaagattcattctattttaaaacgtatagttaatgttcaaattgaaattacgccctgatttgtattgacgagtaatttgctccacttttccatgtctagtttcttcaaattgcttgaaagaaactttctccgccaacaaatcgcgtacagcaacctttatttccagattaccaatttttttcgaaacacttaaatctactgcattacggggcatttcataagaatcgggtactctgacttcattgtctgcggttcccaaactacggcctacaccaataatacgtttaccgatacggttataaagcaatgcagcattccatccgctatcggcatgttgatagaagaaaccggcattaatcaaatatggagattgaccttgcatcggacggtccttctctttggctcccggctcaaatttcactttacttttaattaaagccccgttcagactaagactaaaattacgcatacctataaaatccagatttttgcgtatatccacttctactccataattatccgctcctttggcattgacatacgaatagataaggtctgtacctccggatacagtataagtccattcaataggattcttaaaccttttatagaaaagagaaacagaaatcagctctccactgctgggataaaactcataaccaaaatctaaattatcaatataagcaggctttaaattataattaccttgtacattgctggcaagatcaaaatcataatatacagaagaagaaacctcccgaaattccggacgattcacagtacgtccataagataaacggaactgatgcttatcattcaaacgataagccgcatttacagacgggaaaaagtcatcatacgtgtaaaacacactagtggggctttcctcgtttttctgtgtatggctaaccaactccattctattatattcaaaacgaactcctgcgtatacattcaatttgcccaacggaagattaccccctacataaccagcactcaagagattattgccttcgtaattattgcgccaatccacttgttccaataaataaagtccattctccccataattcttctcttgtaataattcattagggacattcattactttataagcacccggcaaaccatttttccaactatagataaaaaaacgggtattatattcacgagcacgatgctccgtgtaagctccaaccttcaggctaggagtaaaaatcccgaaagagaaatcgtgctgataattgatgttagccgacaaaatatgttcatccaatcgggaaaactcccgattaatctcattcaagttctctacttccaactgattggtctcctcattgagtacggtagtatatcgacggcggtccggcatattccgattggcataagaatatccagcactccaatccaacttatcggtattacccaatgtatgcttccccgtaaattgaccattataagtggtacgactctgataataatattccgcactctcttcataatcactttgtgcatctgttcccttacggtaagtatagcggtctttccctaattgattaaaaatattcttaaactcatagcgactgttaccactggcaggtatataagtaaaattcagcatagttcctatacgaacactatgattatattggtcatctatacttttacgtaaataattagaacaatcgtgagtcatatcataagcaccaaacaaattgttatccatatccagatatgtcctatagctattgctatagttcactgttcctaatatagccaaagtacgtccgctactatccacccagcgacggctgaaattcatattcaggctaagatctgccaagggcctacgatctttaacggtccagtcattatttaacccattatttaataaatcatagccattgttcatcggactaagcacagcattgattccacctttcaagctacgaaagccattatcgaaacctagaaaatctgtgccacttcctttattatacagaaactttttaaaatgagtctgatcatttaaactagttccaaccgaaatagtaaacagattactgctaggaacatctttggtattcactaaaataaaaccaccactgaaatcagccggatattccggtgcaggcgatttcactaccaacatattatccaactgcgacgatggaataatatcgaaagagaaagcacgcgcatcggcttcagaactaggtacggcactattattaatccacacattattataccgttgtgaaagcccacgtaccataacgaatttctcctcaattatactgatacccggtacacggcgaatcacttccgaagcatctttatcttgcgtcttggtaatctgctgggcagaaactcccgtttgcataaccaagctagtacgttgttgggtaataatagcattctccgtattctttttagcatccgctacaaccacaacttctcctaattgttgattatcctgttctagttctacttttatttcgaacatgccgtttattgtaacctcaacagtctgtgtacaataagacacataagatataataagcttgtacgttccatttcttaatcccgcaagttcgaaattaccatccacatcagtaatagttcctgtatttgtaccacttaactgtacagcagcaccaataagtggctctttagtcgctttatctgttacagttcctctcaaagcagccgcctgtacagtcaataccaacatcaagagaattatcataaggctaatgcctttcatctgagctttcatcatacttttaccttgttatttttccgatggcaaagatcagataaaagcattacatgtataatacatctgcatgatactccttttgcgtatttatttcaatgacgtttcattgcattttgttgaaaaagctcctacctttacaaataaattgtaaaatagaaaaagaatatgagaagttttgcatctgacaataattcaagtgtacatccccgcatcatggaagcgttaatgaaggccaataacggacatgcacttggctatggagatgatccatggacagaagaagccgcccacaaagtgaaagaacaattttcacgtccatgtgaagcactgtttgtttttaatggcacaggcagtaatactatggcgctgcaaataatgacccgtccttaccatattatcttctgtgccgacacagctcacattgctgtagatgaatgtggtgcccccagtaaagcgactggctgtttcatgcgcacaattcctactccggatggcaaactgactccggaattactaaaaccatttatggttaactttggtatagaacaccattctcagcccggagcaatttacctaagtcaatgtagtgaattaggaacaatttataaaccagaagaaatatgcacattgacagaatttgcacaccggcatggactgtttgtgcatatggatggtgcccgtatctctaatgccgcggcagcattgggaatgagtcttgatgatatatcaggagcttgcggagttgacacattgactttgggaggaacaaagaacggactgatgggagccgaatgtgtagtgattttcaatcaggatttgataaaggaagcacgttatgccagaaaacaatcttgccaattggccagcaaaatgcgttatatctcttgccagttcacagccttccttgaagataacctatggttaacatgcgcacaacatgccaacgcaatggcgcaacgcttgtacaagaaactttccacaatgcctgatataaagtttacccaaacagtggagagcaaccaattattcttcatcatgccgcgtgaaaaagaagataagctacaagaatattatcatttctacttttggaacgaaaccataggagaaatgagacttgttacctctttcgatacaacagaagaagatgtcgacaaactgatagcttgcataaagactctataatcatctcccggttctctatcagggcaggccttcagacctgcctgttctatttccagtccctattccaaggcataagtaccggtgagggtttccggacctgcccctgccggagaaaagacatggcggagccttccggacagttccgtgggaaacgtatccacacccacgggaaagataaggtttttaactaattcccccaagttttcaaactgagccgaaaaaacagtagaggtcacatttcacacgtgcggatacaaaaaaaagcctccggaacttcttcaagtccggaggcttcaatcaaaacggcggctacctactctcccactgtgacgcagtaccatcggcgtggtgaggcttaacttctctgttcggaatgggaagaggtggaaccctcacgctatagccacctgaataaggttgacatattgttgagctgttatcgtaatttcattctgtagtaaaaaccaaaggtatacaccatccgacatataaggaaagtggacgggcaattagtaatgctcggctttgatgtctccatctttacacctgcatcctatcaacgtcgtagtctacaacgaccctgagaaatctaatcttgtggccggcttcgtacttagatgctttcagcacttatccgatccagacttagatacccggcaatgcacctggcggcacaaccggcaaaccagaggtctgtccaacacggtcctctcgtactagtgtcagagccacgcaaatttcatgcgcccacgatagatagagaccgaactgtctcacgacgttctgaacccagctcgcgtgccactttaatgggcgaacagcccaacccttgggaccttctccagccccaggatgtgacgagccgacatcgaggtgccaaaccactccgtcgatatgagctcttgggagggatcagcctgttatccccggagtaccttttatcctttgagcgatgtcccttccatacggaaacaccggatcactatgctctagtttcctacctgatcgacttgtcagtctcccagtcaagcgcccttatgccattacactctaaggccggttaccaatcggccggagggcacctttagaagcctccgttacgcttttggaggcgaccaccccagtcaaactacccaccaatcaatgtccccgttccacgggttagaatccaaacaaataaagggtcgtatttcaacagcggctccacaaatactggcgtacctgcttcaaagcctccgacctatcctacacatcacgtgcccagattcaatgataagctatagtaaaggttcacggggtcttttcgtcccatcgcgggtaatcggcatcttcaccgatactacaatttcactgagctcacggttgagacagcgtccagatcattacaccattcgtgcaggtcggaacttacccgacaaggaatttcgctaccttaggaccgttatagttacggccgccgtttactggggcttcaattcaacgcttctcttatcgatgacatctcctcttaaccttccagcaccgggcaggtgtcaggctgtatactggatctttcgatttggcacagccctgtgtttttgttaaacagttgcctggaccgattctctgcgccctcccataaaagggtagggaccctttatcccgaagttacagggtcagtttgcctagttccttaaccgtgaatcactcaagcgccttagaatattcatcccgactacgtgtgtccgtttgcggtacgggtacctgcaggattaagtttagcggattttctcggcagcatgcttacgcgcactattgccttgtcccgaaggacgcggcatactgtcaggttcggatctcatggtggatttgcctgccatgatcgactcctacacccttcaaccatctattccgtcagatggcggcactgtcactactgcgtctccacgtcactcctgaaggtagtaacggaatattaaccgtttctgccatcggcatcgccgttcggctgagccttaggacccgactgaccctgatccgattagcgttgatcaggaaaccttagtctttcggcgagggggtttcccgccccctttatcgttacttatacctacatttgcttttccagacgctccagaatacctcacggtacgccttcgacgctgactggaatgctcccctaccgatcatatcaatgatcccactgcttcggtagacaacttaatacccgattattatccacgcccgactcctcgactagtgagctgttacgcactctttaaatgaatggctgcttccaagccaacatcctagctgtcttagcagtcagacttcgttagtttaacttagctgtcatttcgggaccttagcaggtggtccggattcttctcctctcgggcacggaccttagcacccatgccctcactcctgcggtagaactgatgcgcattcggagtttgtcaagacttgataggcggtgaagccctcgcatcttatcagtcgctctacctcacatcagtaacccgcaaggctgcacctaaatgcatttcggggagtacgagctatctccaagtttgattagcctttcacccctaccctcagctcatccagaagcttttcaacgcttattggtgcggtcctccagctggtgttacccagccttcaacctggccaagggtagatcacttggtttcgcgtctgccactgccgactatacgccctgttcagactcgctttcgcttcggatacgtgtgtcgtcacacttaaccttgccggcaaaggcaactcgtaggttcattatgcaaaaggcacgccgtcactcattaacgagctccgaccgcttgtaggcgcacggtttcaggaactatttcactcttctgttcgaagtgcttttcacctttccctcacggtactggttcgctatcggtctctcgggagtatttagccttaccggatggtcccggcagattcacgcagaattcctcgtgctccgcgctactcaggatactactatgcttcgacaacattcgaatacgcaactgtcatgctctatggtctttctttccagaaagttcttctctgatgtcttcatgcaacggcgtagtcctacaaccccacccatgccgtaacatggatggtttgggctgttccccgttcgctcgccactactgggggaatcattgtttattttcttttcctgcaggtactaagatgtttcagttccctgcgttagcctcttacatagtaagataatacctcttcaagatattgggttgtcccattcggaaatctctggatcaaaggtcatttgcacctccccaaagcttatcgcagcttatcacgtccttcatcgcctccgagagccaaggcatccgccatgcgcccttctttactttccttatccattcgcccacacttgcgtgccggcgggatgatatatactttcagctctttactactaaaattactgtttgcttgtacaatatgtcatagatcgttcatcttcgtttcttacgtttccgatggagtggagaataacggattcgaaccgttgaccctctgcgtgcaaggcagatgctctagccagctgagctaatcccccgaacttgattccgttcgtagtcccaggcagagttgaactgccgacctctacattatcagtgtagcgctctaaccaactgagctataggactaagttcaacctagtctgtttaattagacccggcttcttactttctctcttccgtatcattacggaatcatatcttgaataaacaacaccagcagtacaagaacaaaaaccttatcgatctttcgtcctctccagaaaggaggtgttccagccgcaccttccggtacggctaccttgttacgacttagccccagtcaccagttttaccctagggcgctcctcgcggttacgcacttcaggtacccccggctcccatggcttgacgggcggtgtgtacaaggcccgggaacgtattcaccgcgccgtggctgatgcgcgattactagcgaatccagcttcgtggagtcgggttgcagactccagtccgaactgagagaggttttggggattggcatccactcgcgtggtagcggccctctgtaccccccattgtaacacgtgtgtagccccggacgtaagggccgtgctgatttgacgtcatccccaccttcctcacatcttacgatggcagtcttgtcagagtcctcagcggaacctgttagtaactgacaacaagggttgcgctcgttatggcacttaagccgacacctcacggcacgagctgacgacaaccatgcagcaccttcacagatgccttgcggcttacggctttcaccgtaattcatctgcaatttaagcccgggtaaggttcctcgcgtatcatcgaattaaaccacatgttcctccgcttgtgcgggcccccgtcaattcctttgagtttcaccgttgccggcgtactccccaggtggaatacttaacgctttcgcttggccgcttgcagtatatcgcaaacagcgagtattcatcgtttaccgtgtggactaccagggtatctaatcctgtttgatacccacactttcgagcctcaatgtcagttgcagcttagcaggctgccttcgcaatcggagttcttcgtgatatctaagcatttcaccgctacaccacgaattccgcctgcctcaactgcactcaagatatccagtatcaactgcaattttacggttgagccgcaaactttcacaactgacttaaacatccatctacgctccctttaaacccaataaatccggataacgctcggatcctccgtattaccgcggctgctggcacggagttagccgatccttattcataaagtacatgcaaacgggtatccatacccgactttattcctttataaaagaagtttacaacccatagggcagtcatccttcacgctacttggctggttcaggctctcgcccattgaccaatattcctcactgctgcctcccgtaggagtttggaccgtgtctcagttccaatgtgggggaccttcctctcagaacccctatccatcgaagactaggtgggccgttaccccgcctactatctaatggaacgcatccccatcgtctaccggaatacctttaatcatgtgaacatgcggactcatgatgccatcttgtattaatcttcctttcagaaggctgtccaagagtagacggcaggttggatacgtgttactcacccgtgcgccggtcgccatcggccttagcaagctaagaccatgctgcccctcgacttgcatgtgttaagcctgtagctagcgttcatcctgagccaggatcaaactcttcattgtaataatatctttttccaactgttcagttgataatctgctcaaggattccaaatctatcaatatcaatattgacggttcttgttttttccgtacaccatatatatattacatatagtgcaccggcttgtactacttgtttgtttatcttaaatctttcaaagaactctcatttatattttgccatcgtttccgaaagcggatgcaaaggtaagagattttatcgtaaccgccaaatgttttcgaaagttttttttgaaaaagtttttttttcgaaacttccataaaaggcgggacgtccatcctccccacgtcttatccgttctcgctcccttagccccgctaaggtaagatactgggtgcagacactgtcaaggaaaactctcctacgtttgtttcaccaagtcagtcacacactgtctgaagtgccgcatctctctcgattgcggatgcaaaggtagaccttttaacgataaccagcaaacatacgaaggaaaaattatacggattttctgaattttttttgtaatactctgaataacagatgtgttacaaagcatgtttttatagcggaggacacgggaggaaaaagacacacacattataatattcgcacgcgcgtatagggacggaaaaaggaaggaacctatacgaaaacagcagacggaaaacaaggaaagacggaaaagaagcaagcccgaagaaaaaccggacaggttacgaaacacaaaccacagagctctcaaaagtgctgactccgcaaacactggggaaaaactgtaggagaaaaaatagaaaaacagtcgcatcaagctcggatcatacttccccaccaaagtccgacaaacccaaaattccgaataaagaaatgaaacttagttcctgtttaactgttgttccgtattcttttgaaagttctttttaaagaaaatttaaatatattttcatattgcaaagcaattcctatctcacattccaacttccccaaaataacacccgagcatgttgcctgcaaccaaaaacagttcttataacctgtcttccccatttattttgtacctttgccacacattgaaaatctataaaccgaaatattataaaactatggcaaaggaattagaattaaagtacggctgcaatcccaaccaaaaaccgtcacgcatcttcatgcaagaaggggaattgcctatcgaagtattgaacggacgtcccggatacatcaattttctggacgctttcaacagctggcaactggtcaaagaattgaaagaagctaccggactacccgcagcaacctccttcaagcatgtcagtccggcaggagccgcagtaggaatcgagttgaatgacaccttgaagaaaatttattttgtgaatgacttgccacttaccccattggctaccgcatatgcccgtgctcgtggcgctgaccgcatgtcttcttacggagactttatcgcattgagcgatacttgcgacgaagctaccgcgcgcctcatcaaccgtgaagtttcagacggcgtcatagctcccgattacacaccggaagcgctggaaatcctgaaaaacaaacgcaagggaacatacaatgtaattaaaatagacccagcttaccgccctgcacctattgaacacaaagatgtattcggcattacttttgaacagggccgcaacgaaatcagactggacgaaagcctgctgactcatattccaactaaaagccagcattttccagacgaagcaaaacgcgatttgattattgcccttatcaccttaaaatatacacaaagtaattctgtttgttatgtaaaagacgggcaggctatcggcatcggtgccggccagcaaagccgcatccactgtacacgtcttgccggtaataaagcggatatatggtatttgcgccaacatcctaaagtaatgaatctgccgtgggtagaaaaaatccgccgtgcagatcgtgataatacaattgatgtctatatcagtgacgatcatgaagatgttctggctgacggcatctggcaacaattcttcactaaaaaaccggaagtgctgactcgcgaagaaaagcgcgcgtggctggataccatgaagggggtatcattgggttcggatgctttcttcccatttggtgacaatatagaacgtgcgcataagagcggagtggaatacatagcacaagccggaggctctgtacgtgatgaccatgtaattgacacttgtgacaaatacggcatcaccatggcattcactggtgttcgtttattccatcattaattattcatactcagtgcaaattgcaacacggatttacagataaaaagcaaaccatacttagcctgtaagatccgtgtttacaatccatataaaaaatcgtcttaaaatttatatcccgctgttacaaaaccggtaatattcttcccttgaagttctttttgaagtttgcacagccctaatcgtccttccactcctatcacataatgccggtattccaccgataaacctatcgccactccataatcgaaacgacgcagatcaagtccatctttgccaaaagtatttatttcaaccacatttccagtattccaatccggtgtagacgatgatgaccagctataccctaaagccttggttttgccaccaatcccccatgcgccatagggacctgccgcaacaagtatataagtattccgatccattgcaaaccgggctgccaccattacaggcaactccaaataggatgcatttactttagcctgagccgaaattccatctgtttcaacaatcgtatgattagtgcctttggaaacaaacgaaacgcctgtttgtaaagaccagatcttatcaaaagggcactccaagccaatgcctaatttatacgccagctttactttaggagatcccatattatcacctataatatttgccatgcctataccggcctttatactccaatccacctgactctgagccggagtcaccatgcttaccatcataaacagtgcaaaaagaagtagttttatcactcttaccttatctattaatgccatatccctaaaaaattgtgtctttaatcataatctgcaaatatagcttttatttcataaaccacgcttcatctaaaaaaatggctgcttctttctaaaagagaaacagccgttctttatatatttaaaggtaagattatatctgtggtcagaatttataaccgatagtggccaatgcagaaaggttatgagcactaacaccgctagctactttagtaaaacttgtgccagtttcaacacctacaactatgttgccaaattcaaaagcaactcctaaccccaaaccggcatcgaacctttttaaaccatcatcaccgaaagtatcagccttctcggatacaccatctattttagtttttccgccaactccataagccaaatacggaccacctttgaaaagaagatcaaaattgctggccgtatgtatccgagcaccaaccatcaaaggcagttccagataaagctggttgatcgtcacatcaaccacgtcccaagcatcagttactccatcacctttcacacctttagaaataaagttcaaacctgtctggaaagaccatatattagtattagcaaaaggtacttccaaacctatacccaccttataagcaaatttagcatctgtaccatccgtatcatcaccataccaatttgacataccaatacccgcattcacattccatttcagatttgattgtgcagaaacacctagtgtaaccaatgacaataaaataaaaaaggctagttttttcatgactgtttgtttttagttaataataaatttcagttcccaattcctttataccgtcattacattcacaaatataagctttattttggaaaccagtcctaatgtgtaaagaaaataagcggaatctttcataaaatgaaaaattccgctcaccaaactattatacagttatatgattcctgattatcagatacatttatatatgattagaatatataatgaaagccaaagtttaactcatccgtatcaaaatctataccaacattttcactctcatatccatgattctcttttttggaatatccaagaaaaccatacttggcaaccagacaaaaatgatcagacaatttgatggcaatacccggtttaataccaatattccacgaattcaaagcgtcattccccttcgtttttgaagtagaaaagccaaatccgccatcggcaaataaccggactacatcactattcaaaaagaaataacgtgcataaggagcaatagtgaaagtattagttttcacatcaccgcttttattatattcataaccgactactgtaccgacagaccaatcttcatttagttcataaccgacctccggcagaatcttgaaagtagtattcttaacttctgttccttctgtttccactttatcagaacctactccaaatgttccacctacatacacctgcgcatttgcagtaatagcaatcaatgctacaataatagacaatacaatctttttcatctcttttgtcatttttaaattaaactttttacctattaatccacgccgaagaggtttgccttctttgtgttttacattgcaaaggtacagtttattctatgttttacaacatattttatataaaaacgaataattccaaaacaaaggagaggataattgtttaattattaataaagtactgaatattaaattcaatctacattcctatttattcttatgtctgttagcacgttttttacgaaactcagctttcatcttggcagctcccgacccatgcaaccctgttatatagcttttctttttagccttggtcttcactttatcttcttgcttaccactaggagatttaccacctttgaatacaattccttcggtgattgctttttctatgtccatcgtctattttttaggtgttaaattctgttttactatcactctattgccggctttggtacaaacaatttccgttttgtgcaaagtacggtctttcatatcaaaaatcagattcggattgaaatgttgtccatctatccggaattccagatgaaggtgttcagtagtggcacgtccggttctgcctgtcaatcctactgcatcaccggccttcacgatatctccggattttaccaaattccgggaattatgactataaatactttccaatccattatcatgacgcacaacaactacatttccataagcagcgtatgtttttgccatacgtactattccatcaaacgcacaacggatagtatcattggccttagtctttatatccgttccactgtgcccccggcgggctccgtatgcagaaatcactttaccaccgggaagaggaaaacaatattcattctcttttatactatccagatgaatggagaaacttttgcgcccgttaaagagcccgggagtcttgactctgatatggtttacttccattgcggtaaaattactcttggccggccccccagcccatgccgccacacttatgaacaataaaaatagtaattgtgtgcttttcattatctcattttaaaaataaattaattcttcatccttggacgctgcaaactctttcaagagctccaacatataatctgccgcttcctgcaaaccttccttgccgctatatccattaataatagtcagcagatgcgtagttcctgcctccagtttagtacgctcgttatcactggtcggcgtaccgattccgcccatagcatctctgtaaacaggcattccttctatattcaactctccacgtcctatcccttcataaggctctccggatttaccgatacccaacaccaatgtatctccttgtattttatccgcatcaaagccaccgatggaatatccgtaacgaatagataccaagttaataagatctaccaaagtatctatctgatacaaggaaattccacgcaggattctacggcagagcgcttcccccgaaggacgataacggctagggtctttcccacatttcttataagcctcccgagtggcatgaatcgtaaccatatccttaatggaatccgtagtgtacatttcacgatagcatatagtgaactcgtctatctttttccacaaagattcgctataagcagtgttctctaccgtagcacggatggctataccggcaaactgcggacaggctttctttatttcttccgatacttttatttccatatttatttttatactgcgttcttccaatgagtgtgttcctcagacacctaaaagaatgcccgataatatccttcccgaccggattccttgccggcgggccgaaaagaaatcatcgttattatgatacgtacaaatgccggatatctcaatatgttcaggcttcacaccgtatgccaacaattgctgacggttggcttcccacaaatcaatatgccattttgcttctttacgggcaatctgattcatatcaaaccccgcctcacaaaaagcttgataaacttcatcccctacttcaaaagcctccaatgaaatactgggaccgatgcaagctatgagatctttcccttgcgagccgtattggttatccatgactgaaactgtcttctccacaatccgggccaccgtaccacgccatccggcatgaatggcagccactaccttctttcgggtatcatataataaaacaggaacacaatcggccgtagatacacacaagcaataaccgggaatgtctgttaccaatgcatccactccttccaattcagtatttacctgaatagtatccacaactttcacatggtcactatgggtctgatgcggaattacgagttctaccgattccccgggtaacaagctacgcagcaattcccggttgcgattcacatcttctgcctcgtccccacaatatccgttacaattgaacgaagcgtagtttcccttactacaacctccgtgacgggtggtagaaaaacaagaaatgttgggatatgccttcatcagctcatatcccaacattttattatctgatgtcagccgtttcatttcttttcctcttcttcgtcccaattctcatcttcatattcataatcgaagtcatcatcggcatcttcttcatattcatattcaaagtcctcatcctcacccatgtctttcaactcttcctgcagtttggcaacatctttggcgcgatgaacaattgtttccgtacggacaccttccaacttattgctgtccttattcaattctgtccataaaatatccttcagctgctgtatccccaagccagttaccgacgagataaagatatgcggaacattatccggcaatgtcggctccaacatggcaatcagttcttcatccaacatgtcacttttggtaatggcaagcacacgttgtttatccaacatttccgggttgaaggtagccaactcattcagcaggatttcatattccttacggatatcatctgtatcacccggtaccataaagagcaacaaagagttgcgttctatatggcgcaggaaacgaagtcccagtccttttccctcactggccccttcaataattccgggaatatccgccatgacaaaagattttccttcgcgataggacacgatacccaaattcggctccagcgtagtaaacggataattggctattttaggacgtgccgccgatacggtagacaataaagtggatttccctgcatttggaaaacctaccaaacctacatcagccaacagttttaattccaaaataaccatcagctcctgcatgggttctcccggttgtgcaaaacgtggcgcctgacgggttgctgtacggaagtgccagtttcccaatcccccacgtcctcctttcaacagaattatttcttgtccgtgttcggtgatatcacagatatattcacctgtttcagcattataaacaactgtaccacaaggcacttcaataactttgtcttcaccatctttaccaaagcttttgttcttcgatccattgccgccgtgtgtggcaaacacgtggcggtcatacttcaggtgaagcaatgtccaataattacggtttccccgcaaaataacatgacctcctctaccgccatcaccaccgtcagggccaccattgggtacatacttctcacgacgcatatgcgcagagcctcgcccgcccttacccgagcggcaatatatcttcacataatcaacaaaattcgattcagccataattaataatttactaatttatcaatttactaatgtgccaacgaaactgtactccatgtatcattatgcagactgacacattggcggactgctgcatcagcacattagcatattactataatttttcaacagcagcaacaatgtcggcaaaaatagcatccatcgtacccaaaccgtgaatgtgctgatatttaccttcgttcttgtaccagtcaatcagcggagccgtctgcgagtgataaacaaccaaacgtttctttattgtttcctcgttatcatccgcacgtcccgattcctgtccacgcttaatcaggcgagtcatcaattcttcttcgggtacatccaagtccaacataacagatacttcctgtccacgttcggccagcattttcttcaacgcttctgcctgggcgatggttctgggaaatccatcaaaaataacccctttgctttccttaaagctatccagcgtacttgccagaatatcaataatcaattcatcaggcagcaactggccctgatcgatatatcctttggctgtctttcccaattctgtacccttcttaatctcagcacgaagcacatcccctgttgaaatgtgattaataccgaatttctctacaatacgttcactctgagtacccttaccagaacccggagctccaaaaattacaatgttcaacatcttgttttaccttttatttttatatttagttgtacaaatttcattccattacggtgtaaatatcccgatagttacgtcccaagccatcataatccagaccataccccacaataaaatcattgggaatacgcatggccacataatgtatatccaattccaccttcaatttatcaggtttcagcagcaaggtagcgatacggatctctttcggttttctagcttgtaatgtttccaacaagtgcttcattgtcaccccggtatccacaatatcttccacaatcaccactgtacgaccctcaatatcatcattcaaacctaccaactcttttacctttcctgtagaagaagttcctgcataagaggccagtttcacgaaagaaatttcactgggaatggtaaggttacgcatcaagtcggcagcaaacatgaatgcgccgttcaatacacttaaaaacaagggattagttccttctaaatcccgattaatctcactcgctacccgtgccacttcttttaagatccgttcttcaggaatgaaaggagtgaaacgtttatctttgatttgaatggtatccataaccgctattttattaaattgctgcaaaaataacatttttattccaagtatcgaagtattcacataacctctttttgtaaatagtgttatctttgtacgttcaaacaaaagagattgtcatgaaaattatttcgagcacccaactaaaagagctggacaagtacacgattgccaaagaaccggttgcctccattgatttgatggaacgggcagccgaagaactgactcgtgccattacccaccgatgggatacttctttccatattgtagtattcgccggaccgggaaataacgggggcgatgcgcttgccgtagcccgtatgttgtctaagcaaaactatcacgtagaagtctttctgtttaacaccaaaggaaaactgtcggaagaatgtcagaccaatcttgaacggttaaaagaatgcggctcggtgtactttactgaagtaagcacacaatttgatcctccagtcctgacagaaaggcatctggtagtagacggattattcggttccggactcaacaaaccactgaacggtggatttgctgccgtagtgaaatatattaatgcatccaaggcacaggtagtagccattgatgtaccttcaggattaatgtgtgaggacaacacttataatatccgtcaaaacatgatacgcgcggatgtcactctcagcattcagctacctaagttatcctttcttttccccgaaaacgaagacattgtaggcgaatggcaactattggacatccaactgaaaaaagactttattgatacagcacaaagtccctactatatcacagaggaagaagaaattcgcagtctcatcaaaccgcggaaacgatttgcccacaagggaactttcggccatgcactgctcatcgcaggatcttatggcatggcaggagcatccattttatctgcccgtgcctgcctgcgttcgggagtgggattactgactgtccatgtacctatccacaaccatgatttacttcagaccactgttcccgaagccattgtacagacagacatacacgaccattattttgccgagcccgtggatacagaccgttatcaagccatagccatcggtccggggttgggacaagaagaagatacagcgttggccatgatggaacaaatacaaggttgtccggtacctttagtgctggatgcggatgccattaatattttcggcactcaccgcaactggctcagccggatgccgaagcgctgtattctcaccccccatctaaaggaactggaacgactgataggtaaatgcatggatacttacgaacggctgacaaagacgaaagaactggcagcctatctgcaaagctatatcattataaagggatcatggagcacagttgtcacccccgaaggaaattgttatttcaatcccaccgggaatccaggtatggcaaccgccggcagcggtgatgtgctgaccggtattctggcagccttattggcacaaggatatactcaagaagatgcatgccgcctaggcgtctacgtacatggtctggcaggagacattgcagcggaagaaaaaggagaaataggaaccacctcaagtgatcttattgacgcattacccgcagcatggaagaaattaacagaaacaaaaggcaaatttacaaaagaatagctatatttgcttacatatatgatagaatatagaaatatgaaaaaaggattaatcgcagcagggttactggtttcattaagcggcaccgcacaagatgtcagtacatatactcccggaaccatgggagaaggagtggtttattatttgcctaagaccgaaatagaattgcaagtcaccgcaaccaaagttgtctacacgcccggagaattctgccaatacgccgatcgctatctgcgccttacaggcatatcatcccaaccggaagaacattgggaaataaacagtatcaaggtaaattccataggcattcctgacccggacaatgcatacgctgtaaaactgaaagacaaaagtgcggcctcacaggtagaattgactcctgaaggaatcataaaggctatcaacaccacctctcctatagagaaagcacctgtgacaaaggttgccgatacggtcaaaaaacgtattgacccacgcagttttatgaccgaagagattctgatagccggttctaccgctaaaatggctgagttggtggcgaaagaaatctacaatatacgagaaagcaaaaacagcctgacccgcgggcaagcagattatatgcccaaagacggagccgctttaaaactcatgctggacaatctggatgaacaggaacaagccatgatgcaaatgtttgccggcacaacagaccgcatagaaaaatcatttaccatccgcataaaaccagaagcggacatgaaagaaaaagtagctttccgtttctcaaagaaactagggatgctggatgccgataatttatccggtgaaccttattacatttccatcgtcaaccaagaaacattgccaccgatggatccgaaaggcaaagaaaaaaagaagacggatggtgttatttacaatattccgggaaaagctcaggttaccgtattcactccaaacaaacgttattttgacggagaactacctgttacacaatttgggacaacggaatgtctgatagataacctttttaataaaaaagtaaatacacgagtgatctttaatcctaataccggaggaattgtgaagattgataaagactaaaactccatctcacccctacatagcaaaatgagggtatccataatacactggacaccctcattttcactaaaagacaatcaattattttttaatatttggttcctccaatccatacccctttttcttattctcacctttcagccacaaagcaaagaacaatgcagccacaccaaagcctgcaaatatccacatgggaagtgtataatcataagtctgcattccatctactaccggtcctttgcaatactcattcaagacaaaaccaatcaaagcaggtacacccatcaacccccagttttgtacccagaagatcaaagcgtaagctgtacccaactgcttttccggaataattttaggaacagagggccacatagccgatggcaccaaagaaaagccaatccccaatataatcataatgatagtggcaaaccaccatacattcaagacaggtaacgcaaacattgtatgaacaaaaatcaacagcacagaaccgatgatcatcagcgtagctcccttgcctatccgatcgtacacattaccgaaaagcggagtaaggaacaaagttcccaatggtaacaggctaggaatagtacccgccaattccggatctacattatatttctgcaccatcaagtctgtagcatatttcaagaaagggaatacggcagaataaaacaacacacacagcaacgcaatcagccaaaatcctttattggttacaatcaaccaaatatctttcatacggaaaggctcttcaggttccgccccttcttcttctaaagaagcatccagtttcttatcatagaaagtataaataaagaatgctaccgtaccaatacaaagcatagtaaggcacagcaacaatggagcaggaatattaggatggaacacaccctcatcatcagtaataccaaagaaagtagcgataggaaccgtaacagccaaagccagcatagtgcctaaacgggctgtcgccatctccatacccatggccagagccatttcttttcctttaaaccacttcacaataatttttgagaccgtgatgcctgcaatctctacaccgacaccaaatatagcatatcccaacgcagccagtcctacctgggttttcattccaagcaaagtgcttccctcagcaaatgtagtagaaatagcataatattttaacccacagcccaacaccatcaaaaggcatgctcccataccagtaaagcgcactcccatcttatccaaaatgataccaccgataataagcataaaggcaaagacattgaaccaaccgtatgcactggtaaaaataccataatccagactatcccacagcagctccttttcaagcatcggttttaagggggacattacatcggtcaaaaaataaccgcatagcatggtgaaagccaccaacgccaacacactccaccgaagaaccttggagtcattgagctttttttgaatttgttctttcattcttttataagatttttgattaatagtttttcatgttcagcttacaaagatacagttttttaggtagagaagcctctttccataaaaaagttctatctttgcgtgacgattaaatcgttttattgtaggaaatcgtcataaaattactttttataaacttaactttattgatcatgaaaaaaagcaaaacatttcttgtttgcgccatgttgagtggcagcgtcttattttcatcatgcatcggttctttcggattatggaatagtttgaaagactggaaccagggggtaagcaacaagtttgtcaacgaacttatctttctcgctttccatattgtccctgtttatgaaattgcttatctggcagacgcattggttttaaattccatcgaattctggagcggttccaaccctacagcttctatcggtgaagtaaaaacagtgcaaggagaaaatggcgaatacttggtaaaaaccaacgaaaacggttataccattaccaaaaaaggagaagacaaatctgtagatttggtctataacaaagaaaacaatacatggaatgccgtagccgacggacagagcttcgaacttgtgaaaatgaacgaagacggaacggctgttttgagcctgcaaaacggaacctccatgactgtcactcctgatgcacaaggtattgctaccgcaagaatagctacaggaaactccttgttttttgctgcaagataataaacacaacatcatttaaacacaaagaaaagaagttgcccatgcaaacaacttcttttcttccataacaatactactatgaagaagcaaatcatgctgggcggcctactcctattattaggctcctgtactccccaaaacaaagcgaatgacccgaatgcaattgacattgccgtaagtctggaacacctcacagaattaaagacctcccaattgggaaaacaaatccgttatatccctttggaaacaacagactcatccctgattggcaactcctattccatcaagttatctaaagaccatatctttgtctctaccaacggacgatgcctgtcattcaacaagcaaaccggaaaatatcttggcagcatcgggcacaaaggagaagatccacaaggctacagcaatgccaactgctttattcacccccataccaacaatctctacttttatcgccaacccgacaagttggtaaaatacgatacaaaaggtaactatctagggcaagtacacctaccacaaaagatttccccatccctttactttactttttccgactcccttattcttgctcattatggagaaggaataggacaaccgcaagcaagtgcgttactttacttcaacgaacagggagaagtaaaagactcattgccggaatttgccaatccaggtgatcctatgggcatggaccagatatccagcatcaacgtattcaagcaattacccggcaacgccaacataggagggttaatatatataaattatcaggatggaacaatgactgttcttcctatagaccagccttcactttggctgaacaacggcagcatacgtttcagaaaagcgttcaatgacacaatctacgacattaaaggacacgaagctactgtccataccactttccataccgggcaatggcatttcccggctgaaaaaatgggacaaaaagaggatacagacaactacatcgttataaccggtattctggaaactccccaacatctcttctttatatctctacagggattatacgacaagagaaaacccttctacggtatttacgacaaagaaaaacatattacttatatgaatgatgccaatgtggggctgacagatgacctgacgcatttcatgcctttctatcccatcacttgtacagaagaaggagagtatgccgctttattggagatagggaaaatagacgaatggatggataaaaatccgggaattgtccaagaaggaaagctaagctttttacaggaaatcaatgaagaatccaatccggtttgtgttatagtggaaccttgacaaccataaaagaacgctgctttcctcacggagaacagcgttctctttcttcaacacgttgaagataacagtatgctaaattagtcacgacctccacccaatgcctgatagagattgattacgccttgcatttcagtaaaacggttagcaacctgagttaactccgcattaagcaaagtctgctgagccgtcaaaacttccagataagtcgtattcccatgttgcatcagcaaagaggtactttccaaagctttatttaatgaatttatttgtttatcataataaactgatttatcacgggccgtctgatatttcaccaaagcctcgttcacttcacttcctgcattcaacaaagcctgttgaaaactcagtttggcttcttcttgctgagctttagctatctttagctgtgctatgttcgcacctttattaaacagtggctgggtcaacgaagctacagccgttgcaatgaacttgcccggattgacaatcatacttcctgctgaattagtccatcccgcacttccacttaaaacaatagaaggataaaaggcggaacgagcctgatttgtggcatagaaagctacttccaacgaacgctccgcactgcgtacatcgggacggttggcaagcatttgcacagggatgcctaccgggaaatgttccttcatcatataagaactgtcccatgtgcccgttctctcaatagcatgaggagattcagccaacaacaacgacaaactgttttctacctggttaatttgttctttcagatcaagaactgaagtacatatagtataatatgtagcttccatttgtgaaacggcagcttcatttgccaatccggcttccatcagagcacgggttgcatctacggtttctttccaggacttttcagtccggacagaaatggccagctgattgtccagcatcagcaaggtatagtaagtattagctataccggctatcagctgtgtccggacagcctgtttatagtcacggctctgttccagcaatgctttcgcctggcgtttcgcattacggatgcggccgaaaatatcaatttcccaacttgccgccaccggtaaagtataagtttgtacagcttttcctttgtcaaaactacttgctgtcccctgaggtgacagagcgaaagaaggcagataagccaatttggctgacagcatagcagcttccgcctctttcacacgccattgtgctgactgcaaatccgtattgttccgcaagccttgctctatcaattcctgaagccgcggatctgtaaaaatctcctgccagctcagattgccgatattatccacggtatcagcaactgccacctcttccccatacaaattatcgggcacttcggttgcaggtttatattgggtatatatgccgcagctactcagtgtgagcgctgcgacagtcagagtgatgatctgttttttcattttttctcttcgtttttgctttcgatgtggtgttgtctctcttcttttgcttctacacattcctcttgaatctgccaatcggccgccggctgaaactgaataggacgtaccttttcctgtaaatattggaatacgataaacaaagaaggtacaataaacagcaacgccagcgtaccgatcaccattccacccacagtacctgttcccagcgaactgtttccattagcacctactccactggcaaccatcaacgggaacagaccgaaaatcatagtcagtgccgtcatcaggataggacgcaagcgggctttggcggcagaaagtgcagcggaagtcaggctcatacctgccttacgacgctcggtagcgtactcggtcagcaaaatggcagtcttagcaagcaaacctatcaacataatcaaaccggtctgcaaataaatattgttctccagtcccatcatcttcgcaaacaggaagctacccatcagcccaaacggaacagacaacaacaccgcaaacggaatgaggaaactttcataaagtgcacttaaaatcagataaatcatcaagaaacagatagcaaagatgataatggtagtacctccctggtcggtctcttcacgggtaataccaccaaagtcgtacccaaaacctttgggaagtgcctgtacggcagtttcctgaacggcacggatggcatcaccggtactatacccttcggcaggcattgcatttacagcaatagaattgaacatattgaaacggctcagcgattctgccccataactgcgggtcaatgtcacaaactggctgagaggagccatctcgccattagacatacgcacaaagatattattcaacgagctttcatccacacgatatttcggatctgcctgaatcataaccttatatactttagagaaacgattaaaatttgaaacatactgcccaccataatagccggataatgtgcttagcacagcatccggagtgataccggcacgcttacatttggacgcatccacttctaccgtccattgcggataacggatatcaaaagtagagtatgccatcgcgatctcgggacgttggttcagagcacccagatattgttgagtggtattgaagaaagtgcccacatcaccaccttgtttatcctgcatatggagttccaacgcattacccataccataccccggaatcatacccggagaaatagcaaatatactggcatccttgatgtctgccgtacggccatatacctgtccgattactgcctgaacatcattttcctttccttcacgctcatcccaaggtttcagtttcagaatcaacataccaaaagagttaccctgtccggctagcagaccataacctgccacacgctgcacatgcagcacctgaggaatatccatcatgcgcttttcaatacgcatcattacgtcattagtcgttttcaatgaactacctgccgccgtgctgacattcacaaatacaaccccctggtcttcatcaggtaccaaactggttttagttgtattcatcaagaaagccaatagtactaccgaggccgcaagaagtgtccataccatccatttgcgtttgataaagaacaatacccctttcttatatcgttcaatcattgcatcgaaagcagcattgaacgctttacggaaacgtgctgcaaaattgtttttttccgttccatcctcattgatatacggtttcaagaacaaagcacacagcgccggactcaaagtcagtgcattgacggcagagatacctacggcaaccgccatagtcaaaccaaactgagtataaaaagtacccgaagttccactcataaacgaaaccggaataaacacagccataaataccaacgaagaagagatgaccgcattgctaatccccttcatcgcatcaatactagccatataagaagaacgatatcccacatcaaaacgcgcctgcaccgcctcgacgacaacaatggcatcatccaccaccgtaccgatcaccaacaccaaagcaaacagggtaatcaggttgatactgaatcctgctatggacataaaagcaaatgtaccaatcaaggacacgatgatccccaccaacggaataatagtagaacggatatcctgcaaaaatacatatacaattaagattaccaaaaaaatggcctcgaacaaggtttttatcacctcatggatagatgcatacaaaaagtcattggagctcataacctgaaccatctccacccctttgggcagatccttccttgcttcttccaaaaaggtatcaatattattgtttacttctgtcgcattcgatcctgccgtctgaaaaatcatacaggaaataccaggatgaccattcatagccccatgataggcatagctttcctcgcccatctctatatcggcaatttctttcagcttcaacacttcgccattatccgaagaccggatcacaatttccccaaactcttccggagtaatcagacgccctttatacttcattgtatattgataagtttcatcagagttttctccgaatgaaccggtagccgattcaatattctgttcagccaacacttgggtcacatccgatggaatcaatttatactgggccatcacgtcaggcttcatccagatacgcatactatagtcaccccccataatcatcatatcacccacaccctggatacgaagaatagcaggtttcaagttaatactgatatagttggacaagaatttctcatcatacgaatcacccggactatatagtgagaacatctgcaaaatactggtctgccgctttgaggtagtcacacccacctgcgttacttctgccggtaactgtcctgttgccttcgatacacggttctgcacattgaccgctgccatatcggggtctgtcccttgtttgaaatacacagtgatatccacaactccggcatttgaagcggtagaagtcatataagtcatattttccacaccgttaatcgcttcctccaacggagcgataacactcttctgaagagtttccgcactggcaccaaaataagaggtacttacctgaatggtaggcggagcaatatcaggatattgttcgacgggcaaagtgaacagcccgatgatacccactaccactatcgaaatagaaataacagccgacaggatggggcgttctataaaggttcttaaattcatagtctttcttagttctgttttactttaatgggagtaccttcacgcagcaaacctacgccttccgctacaatgatatccccctctttcaatccatcgttcacgatatattcctgtcctccatttacacgggtcacactgacaggagctgattgtgccttgccgtccacgactttatatacgtatgtaatatcctgaatttcaaaagtggtagcctgaggaataaccaaacttcctttcatcgtaaccggaagaatcacatttcccgatgttccgctatacagcaacccattcttattcgggaatacggcacgcagacttgcggtacccgtattacggtctaccaccccactgatggtttcaatgcgtcccttttcgccatacatagacttgtcattcaattgcagttccacttccggcatatttttcaacgcttctgctttggaaccatattgacgggtcagagccaacaattgattttcagtcatcgaaaagtagacatacatatccgaattatcagaaaccgtagtcaacggttgtggcaaactggcactaaccaatgcacctacccgataaggcaatgtaccaatcaccccgtccgaaggacttttcacctcggtatatgaaaggttattgcgagcactgacttcctgcgccttagcctgagccaatccagccttagcggtcaggtaagagttttccgcagtcttcagatcaaactctgaaaccacctttttggcaaacaattctttcttgctgttataagtcagttcggctgtggcaagaccggctttagccgattccacattggcgacagcagtttccaatgccgccttataaggcacttggtcaataataaataagacttgccctttacgcactgcctgtccttcctccacacaaagccgggtaaggaaaccggaaacttgcggataaatatcaatatcctggcggccacggatcgtagccgaataagtagtagacaaaactttgtccgacggtgatacctttaataccgcatattccgcctccatttgtgcaacaggcgcctgtttacacgacgctgtcaaagcagcacaaccaaccaataccattagtcgcatccattttttgttcaatgtcatcatattccaatcttttaaattcggacgcaaaggtagatggaatttttcaagccgacacattcaattattagctaccattgttcaaattcggaatagatttcctattataacaaaaataatagttaattttgcatcaaaacaagaataaatatggaaatattgagtttaccagagaatgaaccgtttatcaccggaatagaagaaagtatagatatatgctccaatcagatcataaagttagcagacgcatctatttttcattgccgtagcggaaaagcccacatagaaattgatttgcaggcatacgaagtgacggagaacacccaacttctgcttctccccggcagtatcttcaattgcacctgcgccagccatgattttaccgtttcctatattgttttttccgacacccttttcagggagatcacctcacgtctggatccctccttctttcactttctaaaagagcatccatgcattgtcatccctgaagaacgtgtaaaaccattcatcggactcagcttggtcatgaaagatctttatgaagacagggataatagtttccgcattcagatcttcaaaaatttcattcaaaacttcattctggacttctatgacaagacccaacacctgttcctgcaaaaaaagaccgaaggaataaatcgccaggaagagatattcaaacgtttcatccaattaattcataaacattgcaccacccaacgtgaggtatctttctatgcagccgaactattcatcactccccgttacctttccacaatcgtacaaaacgtatccggcaacacagccaaaagcattattgaccgacatgtaattcttgagattaaagcattactacaatccacatctctaagtattcaagagatctccaaccgattatctttccctgaccaatctttttttggccgctatttcaagaaacatacaggcaagtcccctcttcaataccgaaaccggtcttaaaacaaaaaaagctgccttcaataaagaaagcagcttttttctgtttatataggatgaatcaattattcagccaatttattgtctgaacccagcacgttaataattttgtgcttgtacagtttttccatattgtcacgagccggacctaagtacttacgcgggtcgaattctgccggtttttcagcaaaagtctgacggatagcagcagtcatagccaaacgagagtctgagtcaatgttgattttgcaaacagcagacttggcagccttgcgcaattcttcttcagggataccgatagcagccttcaatgcaccaccatacttgttgattgtttcaacttcttcctgaggaactgatgaagaaccatgaagaacgatggggaatcccggaagtttttccattacagcatccaatacttcgaatgccaaaggaggaggaaccatacgacctgtagcaggatcaatgtggcactgttccggagtaaatttgtatgcaccgtgagaagtaccgatagagatagccaatgagtcgcaacctgtacgagtagcaaaatcaattacttcttcagggtcagtataagtatgatgatcagaagaaacttcatcttccacaccggccaatacacccaattcaccttctacagttacatcaaactgatgagcgtagtcaaccaccttcttagtcaaagctacgttttcttcgtaaggcaggtgagaaccgtcgatcattacagaagagaaacctgagtcgatacagctcttgcaagtttcgaaagtatctccgtggtcaaggtgaagaacgatttcaggttttgcacaacctaattcttttgcatattctacagcaccctgagccatgtaacgcaacaaagtagcgttagcatactgacgagcaccttttgaaacctgcaaaataaccggagattttgtttctactgcagctttgatgatagcctgcatctgttccatattgttgaagttgaatgcaggaattgcatatccacctttgatagccttagcaaacatatctctagtgtttaccagacctaaatctttgtaattaaccattgttctaatatttataattgttagtgaattaaattccactgcaaaagtaatcataaatgcgctaactatggcaagttcacaccaaaaatatctcataaaaaatgattttattaactattttcttcactaaaacatacaaactgattatattgtaatgtctaccttacaatactataaaagaagaaaataaggcttttagaagaaaaaacagcccgaagttttttctatttcaaagaaaagcagtatctttgcggtccaaaatggaccattacacccaatattgtttaccagacaagtaaaaaaaataataacaataaaataatatacagaaatgaaaaaaggtattcatcctgaaaactatcgtcccgtagtattcaaagacatgtcaaacggtgatgtatttttgtcacgttcaacttgtagcacaaaagaaaccatcgaattcgaaggtgaaacttatccgttggtaaaactggaaatttctaatacatcacacccgttctacactggtaaatccaaattagtagatacagctggtcgtgtagacaagttcatgagccgctacggcaaccgtatgaaaaagtaatttgtaacttatacataagttccaaaataaaaggctgcaacccgataagtttgcagccttttattttatcatacgtatccacctttatttcaaagatacatcattatactttccccccttccattcatacactacaggttctttcctgatgtatacaaccaatttttcccgttccgtctttgccagataatccggagtagtataagtaaaagaaataataggtttgtcttctgataaagtggctttcaccaactccatatccgccttctctctaatcgcggcataagcctcatcggtcagcgtatccaccggcagataaaaagccccgacggagggaagctgaataaaatcctccttcgccagttgctgccagtccgtattataaaaacgaacttcactatcacaagccggaccgcaaacagtattcactacacaaatcacctttacagaatcattcaagggtaacagtttcatttccatagaactacttccggtggtttgcagaaacaaataatcatccgtcagtcttttcagttcagatactttgccaaaacgatttttcacttccgctttcatattgcttgccagaaaatccacacaatcctcacgatttacctttgtcaataaaggagccaccgaatcgggcatggcaataaaaagagttttcatatcctgagcgtacaatgaaagcccacataacagcatacctattacaaacaatgtctttttcatcacattttcaaattaaaatcctccaaagatacatattttgtcagcttattcccaaccgcattatatttttttctatttttgtcggactgataaccaactaaacaggaaatgctatgtatttacacaaagagttagagaccctgacacgacccgaaattgagaaactacaattggaacgactgcaaaagactgtccgccattgcatgaattcccctttctataaacaacggtttgccgaaaatcatctgagtccggaagatatccgttcattggatgatttacagaaaatcccgtttaccaccaaacaagatctacgtgacacttatcctttcggactggcgtccgtacctttggaaaaaacagtccgccttcactcatccagtggaacaactggaaatcccactgtcattctgcatacccaaaaagaccttgacgaatgggctaatgcagtggcccgttgtctttatatggtaggattacgtccgggagatattttccagaactcttccggctatggaatgttcaccggcgggctgggctttcaatatggtgctgaaaggctgggaatgctgactgtacctgccgctgccggaaacaccaaacgccagttgaaattcatctccgatttcggaaccaccgccttgcacgccattcccagttacgcagcccgtatgtacgagataatgcaggaaatggggattgatccgcgtcgtgacaccaaattgagaacattgatcataggagcggaacctcattccgaagaacaacgccgccgcatcgaagatatgctgggtgtaaaagcctacaactctttcggcatgtccgaaatgtgcggtcccggtgtggcttttgaatgccaggaacaaaacggattgcatatatgggaagactattatatcgtagaaatcatcgaccccgacacattggaacctgtgcccgagggtgaagtgggcgaactggtactgaccaccatcaaccgcgaggcgatgccgttattgagataccgtacccgtgatctgacccgcattctgccgggggaatgcccctgcggccgccatcacaaacgtctggacagaatgaaagggcgcagcgacgatatgattatcctgaaaggggtcaatatcttccccattcagattgaaacgattttattgcaattcaaagaattgggcagtgactatctgatcacactcgaaaccgccgaatctaatgacgaaatgactgtagaagtggaattgagccaactgttcaccgatgactatggacgcctgcaagcattgacccgggaaattacccgccaactgaaagatgagatattggttaccccacgtgtgaaactggtacccaaaggagcactgcctaaatcggaaggtaaagcagtccgtgtgaaagacttacgtaaaaccttttaaaaaataagtttatgactatacaacaattatccgtcttcatcgaaaacaaatcggggacactacagaaagtattgaacttattgaaagaagcaggcatacagttgattgcctctaccattgccgatacagtagagtatggtatttaccgtatcatctgctcggaacccaaacgcgcatacgagacgctgaaagaggcaggaatctccgtggcactctccgatgtgttcgccatcacactagacaatcagccggggcgggcggcagacgccatcaccattttcagtgaagcccaaataggcattacttatctgtattccttcctgttaggaaataaaggcatcttgattttccggacagacaatccggacagagcaagggaagtgattattcttaataatctctcttttgtagccgaaaaagatttatcaacactgatttaaagtattccttgtaggggcggagctgcgtgtccgcccccacaattatcctctgcgtttcaagaaatccgtaggactttctccgaaatattccttgtaacacttggtaaaataagaaggagatgtaaaacctacctcatacgttatctcggatatggttttctcagaagaagccaacaaagaagcagctttctttaatctggcaatacgcaccagttcattgggagaataattggtaagtgccttaatcttacgataaagctgcaccctgcttaatcccatcttactgcctaattcttccacacttaactcagaatctatcaaatttgcttctatcagctctctgaagcgctccacaaatcctttatccacctcgcttacagactctttagacaaagtaatcttatctccgaaaaactgtttcaaccgcttatggttatcaatcagattccgaagacgcaccagtaacaatttggaattaaaaggtttggaaatataagaatccgctccacattcaaacccctgtatccgctgttcatccaaagaacaggcagtaagcaacatcaccggaatatgagaagtctgtaattccattttcagcttcctgcaacattccaatccgtccatcaccggcatcatcacatcacagataatggcatcaggcacatatttcatagctttctttaatccggcatgtccgtcggcagcctctatcaccgtatattcctctttcaataatgatttcacatagccacgtacatccgcattatcgtcaattatcaagatgcattccttattctcatccggaagccgttcttctgtttccgtttcctccaattcctccaccaccgtcggctgtgtagtgtgcggttcctgtatccgatctacagactgctcctccactatctccataggaatatccaccgtaaacactgttccttttccttccacactgtccaccgttatcaccccgccgtgcaactcgacaaaagcctttgccaaagcaagaccaatacctgagcccgcatggttcacatccatctgataaaagcggtcgaaaatatgccggatgtgccggacagagattcccgaaccggtatcagcaactaccagacggacatatcttctattttcctcctttattaaagtagaaagtgtgacagtgatagttccattctccggggtaaacttaaacgcattggacaacaaattaaaatagacacgttccatcttttcggcatccaacgccatcagacagtctgtccggtcatcgttcacgtccagaacaaaatggatatgctttctcaaagccaatgtttgaaatgcatggctccattcctgtaattgcgcacgcaggtccatattggttctcaccaactccagtttaccattttcatacttacggaaatcaagaatctggttgaccagcctcaacagaatattcacattcttatgtaccactttcaataaggatcgttgcttagaggtcaagtctttatcctctaaaagctgttccaccggatcggcaaccaaagtaagcggagtacggaaatcatgagaaacattcgtaaagaagaccagtttggcatgagtcgcctcttccaactgcttggagaggctgatcagttggtcgcgttgttcctccaattgtttcttttgacgggataactccatgttcatccggttctttgtccaatacgcacggacgatgatcgccaataaggcagcaaacagtaacaggataatcagacatgcatacagaaacatggtctgggcagagtatcttgaccaatattcgtccacctgattattcagccgttctatctttccgtcctgttcggcaatgtggtctgtctgcaactgcatgacacgggcattcgttttatcaacaagggctgttgataacttagtatcccgttcatacggacgcttctccaaaatatccatcgccacctgcatcactttatctcctccggtagggtaaataaaagtggcatccaacactccttccagtacctgctccactccataccccttgccaggcaacgcatcaataccgacaaacaacatttccttttccaactgtcgctgtctggccgacaaataagccccgacagccatgcggtcattttgggcaaaaaccagatttatatccttattgtcttgaagtatggaatccattttctccccagccacactttgcagccaggctccgtccacgctggcggtaatttctattccaggctctgccttcaaggcatccgccaatcctctatgacgctccatagccggagtggaaccttccagtcccgttatctccaaaatcttcccttttccacccaaacggttcacaatatattgtcccacatctttgccaatctcacaattatcagcacccacaaaagccgtataacggtccgacaaaatcttacggtcaattaccacaacaggtattcccagcccgtatgccttctccacaacaggagtgacagccgccgcctcattcggagcgacaatcaataaatcaactttcctgtcaataaaatagttgatatcttctatctgattccggctattatctttcgcggtacggatctccacctccaccccatcataaaacaaggcttcacgtacaatttcatgattcattttatgccgccattcgtcatcactacattgtgaaacaccaatgtaatagcgcgtatgtttctgactgcacgatgtcagaattcccataaggcataaaatcaaaaacaaaagatgttttttcatgttcctcaaggtatttatagataacaaagataaaaggtaaccgctaataaaacaaacatctgcaagagaaagtaaaaaaagaacatcgcgaagaacctgattacatctactttgtatttacaggttcttcgcgatacagcctcagacaatatgatttccaatccaatttgaatgagtatccgcaaccattaaaatttaaatcaactcattctttaaacgagccggcaactcaggcatagccccgttttgcgtacatacgtatgcagaaacctcaacagccagtttatgcgcctcggcaaccggctttcccttcaaaatagcagctacaaaagtcgccgtgaacgaatcgcccgcacctaccgtatcggccacctccaccttcggagtctctacaaatgaaatctcacccggagtaaagacataactgccattgacaccacacgttaaaatcaacatcttcagattatatttcgccaacagaatccagcatttatcctgcaagtctatgccgggataaccgaacatacggctcactgtgaccaactcctcgtcattaatctttaaaatattacattttttcatcgagttgcaaagaatctccttcgtatagaaaccttggcgcaaattcacatcgaaaattttacattgtccttctccttcgggcatcacatccagaaaacggttgattgtttcccttgaaaccacactacgctgtgccaacgagccgaagcatacggaacgggtattctttgccaactcttccaaagcaggtgtaaaaggtatattatcccaagccaccccttcttttatatcatacataggtaccccattagggtccagttccacctgtacggttcctgtgggataaggcactttctctatctgatacttcaagttcttgccatcaaaattctcaagtatctcattacccagcttgtcatcgccaatcgcactgaccacccggctgtcaaaaccgaattgtgacacatgataagcgaagtttgccggagcaccaccaattttctttccttcgggcagcacatcccatagtgcctcacccattcctacgatgatttgattcatgatattattcactgtttacaattaaaatcatttctttattttcaaggtatacatcaacaaatagataactccgacagtcatcaccgccacagcgccactctgccccatggcatcaccggcaactcccatggccaacggaaataccgtaccgccgaacagccccataatcatcaatccggaaacttcatttttcttttcgggcatggcaaacaatgcctgcgagaatataatagagaacacattggagttaccgaaaccaatcatggcaatgcaaatataaataattgtttccgaatggaatataaataatcccaccattgccagcaacatgaacacgacactgagagcaaagaaagactttgcagaagccttttgcaagataaaggctccgaggaagcaacccaccgtacggaaaataaaataaagacttgttgcaaaaccggcctcagccaatgtcatatccaaacgctccatcaagattttaggagccgttgtattcgtaccgacatcaataccgacatggcacatgatcccaatgaaagacaagagaataaacggttttcccaacaaggaaaagcacgctttgaagccggacgctttatcgggtttctcttcctcaataggggtcagccccaacaacacgatggcaaaaacggctatcaccatataaacaggaaataatacccgccagccaagcccgaaagtaggaatagcctgcatcgctccccacatggcaatgtaaggggcaagaaaggaagcaatagcttttacaaactgaccgaaagtcaatgtacttgccaacttttcccccgcaataatattactcagcaacggattcaaagaggtttgcatcaacgcattaccgatacccagtaaagagaaagaaatcaacataagcgtatagccgtcgccgaatatagggagcagcaaagaggcaaaagtgacaatcagactcagaagaactgtcttcttacgccctatcttattcatcagaatacctgtaggtacagagaaaatcaggaaccagaagaagaccaaggaaggaaatatattggcttgagagtctgtcagatccagatccgcttttacataattcgatgcaatccccactaggtctacaaatcccatggcgaagaaacacagcatcaccggaattaatttggcatacagatttttattgctattcatggctttatacttagtttacaaacctaacttatatattgtgaaatttgaaatcttcatctctcctcctttactataaaaacgcaaagagttataaggttcattcgggaataccagattagtcatggcaacgcggccaccgtcaacaaacaactccacacttccattatccacaaaaacttgaattttatgtgccttcgcggtgtttatcggagcccaagtacccaaagcaaaatcatttttataattcaccgtaacctctttataacgagcataactttcttcagtatccaaatcatgcggttttaccttcttgccaaaatctacaataccactttccgcacggtccattaccacacgtccctccgaagcgtccaaataaatcttcaccttctcacccaaactgttcagcaattcaaaaccagcctctttaccagccgacaccagttgcaattccagttcaaaagcgccgtcgttattttcaaaaagtgtttctaaacgcttctcgccatttactgtaaaatcatccagctttttagaatctttccgcaagtgctccgtttcctttaccggtgcggcactcagataaagctgtttgtcttctcccgtatacagactcagctcacgtggcaaagcattggcactgcggaactgttgtataggagtatagttagcatactgccagttgctcatccaaggtacggcaatgacacggtcgccggtattcgagaaacaaacagtggcataatggtcttttccccagtcgagccatttcaccacctcgggtttcgtatcacatacaaactgatgcccgtcaaagtcgcctgtaaaatacatcgtaccgctgcctccatagacaaatcccggattgatattgacaatcatcacccatttcatcctggtccggtcaccatctacaggcagttggatgaaatccggacattcgaactgattgggctgaggaccaaatccttctccaaactcactcatgtattcccattgcttcaagttggcagacgaataaaaacgcatattcttatccgcactgacaatcataatccatttctgttcgggttcataccaaaagaccttcgggtcacggaaattctgtagtccgtcaaacggagtaagaaccggattctgttcatacttcgtataagtacgcccgttgtccgtactgtatgccatactttgcacctggctctgcccaccgggtatattacggtgcgaagtataaaaagcgacaattgtattttcaccgtagcctgcgctgttctctttatccacaatggcacttcccgaaaagatatgccccaatgtatcacgggcaatcgccgggtcaagatgctcccaatgaaccaaatccttgctcacggaatgtccccagtgcatatttccccatacggagccgtatggattatattgaaaataaaggtgatattcaccgtctttataaaccagtccgttggcatcattcatccagccataaagcggagtgtgatgataaaccggacggaacttatccctgtttgccgtatcaaatgtatccgaaacccggatgctgtcccaacacagcgcatctgccgccaccttctttataatgacagtagcttcctcacttccctgaggcaaggcaaacggaacataatattcaacgctgtctgtagccagacgcacatccatatcggtatctgcggggctcccagtatccagccttaccagtccttccttgctgctctcctgaatcggaagcaacaaatagttagcgggacgggcaatatgtacgattgtcaccgtatctccctgatgttcgaaaaccaggtcatttttttgtgactgacaagaaacagcgcctcctgtaaaggctaaacctaatgcaaggttaacaagatttgttttcatgaagtataggatattaaaagttttgtttgattgtttttcgttatcggcaaagttaacggaaacctgccttaccggctgaaacatttgtttcattcttatgtataaatgttacttttccaccataaagaagaattaaatccctcttgaatcagaatgttattttcgccgcaaattctacggtgaacggacggatatagctgcctgccatccatgcgccgttatatgccgccgcattctccttatctaccagctcggctcccgaaatacttcctttcgccccggtctggttcaagaagtttatcacagttccgcttaaggacaaatgtttgttcacattccagtttattccaccgaatgtttcccaacggccgttgaaataataggcatttttaatatttgcatacgtcttgctgaagtaacggaaactggcccataccttcaagtctttggtaatgttgtaactagggtccagttcaatcagcaccttcggaatttcggtaacgatattgccggtggcattgatacccgatgttgtcccgtcactaaaggtcactcccgtttcatacttcttatacttcgggctttggtaagtgaacaggaagtggaaatcaaatcctttgaaaggtttcaccaccgcatccgtcgtccaccctattgtttcaatatcataactcaatgcggccgccttaatatccttatcattattcggattaatcagattcaaggtagagttgttgttagtcttggcaatgtaactgaacagtgaggtcagactaatccagtcattattgaaataaatacccgcacgccccaacggaattgtaatcttatctacattcggcatctcggcaggagcaaagttcgacatattcggccgctgggtattgtaggtgaaatcggcggtaaagccaaactgctttgtcattttataagtggcggcagccgtgaaagccatgttcagccaattgtaactgaaataacggggagctatcttcgtaccatcggctgcaactgccccgatatgataaccggcaaagcggcctaccggattgccttcggcattatataccgccaggttctttcctgccagacgctggtactcgaagcgtgcgccataatacacattccatttatcggtgatgtcccagtcgtgagtagcataaagagccagtttgttttcatgtcctttgtaatattcggaagcattctggttcagattataataaggagtgtttccgtaatgatgaatatccttcgtatcagcgctgtacaacatttggggatattcttccaccgtatggtcatacatggtagtgttcgaagcatagtccacatcataataccattcgttcacccccacacgccaagtcatatcatcatacttccgcgacaactcggtggtaaagaagaactcatctatattcccccggttgaaacaggacatgcggctctgtacatatccctcataaggattcaatgttccatccagtcctttggtgctatagccgtcggctcctactttctgctccatagacatcggagtctggtacagataggaacccaaagcatggtcatacttcatattgattttccactccaacccgttatcccaccggtaacggttcagaaccgtcaactgatttcctttactggccgtagcatcatacagactgatctttttcatctcgccggtacgcatgtccatataaaccatatccgatacattgggcagataagaagaagtccccagtccgaaaccgggaatttccttcacactcccatcgcctacataaataaatggtgcaccggtggtagcattggacaaccaatggctgttgctgtaatggtagatggcagagagctgtccacgtccttcattgtagaacttggtcaaggcaaacttatagatctgagtccggtcctgatattgcgcaaaacgcagtttgaacgaacccggatcaaaattctgatagatgctgccgctgtaaaaccaatcttttccgatgcttccattcagattgaagtcaaattgctgtttaccgaaatgattggtgccgtagttcagcacaccattcattttcttctctttatccaagccgagttccgtaaacgaattgacagcataacctatattaccggtagtaatcgctgtttcggaaatcttcagcaatccggtatgtcccaagctgctgtctccgcgccaatgcgtgtttacattatgaggattcgaattatataccacaggcagaccattttcgagtacattcacatcaccaccgggcagaccgatagagatttcacgaggaccattggcactagccgcattcaacatgacattgcgattgccttcctctttcgaatcagaggacactttggtagaatcttgttgtgcataaccattcaagcaagcggcggcaagtaaaataatgaccgcgcccatccggttcttttgctgatttttgttcatagcattaaatgtttttagaagtttttctgaggcaaaggtagggggacagccggcaacctctataaaacatttgttacagctgccggcatttttgtttcattgcaacaaaagtgacggattatgtaacatttctcgtgaaccatacgccttttcacctctaaaaacaaattcatgccaattttccttcagccttcagtttgggctgtttttccccattccatcgaagaaaacacctgaaggataatccttcagcctactgtcagcccgcctcctctttttctatccgaagtatgccggtaatcagcataaaacacttacctttacagcacaccaactgaaaagaaagacaccacaatgaaaggaaaacccctcaaaccttcaagggaaacatctaatttgcccgtacaagctcttttctcctatgaattaataggtttttccagtatgattaagtacttttgtcctgaatactaagacagactccgatggcagactgtacaatccactatagcagaccgtacagtccactacagtaaaccgtacggtccattgcctgcgtctatagaagttaatagaaagaatccccttagcgttcagcaagaaacgacttaatctccctattaaaaagcattaaacatggcagcaaagtatgatttcaaaacctcccccgacatacagggagagaaggaacagcccaccctgtatccgcaaattgtagtatcgggcacaaaaaacctgaaagacctggctaaagacatcgcccggcgttctaccgtccacgaagggaccgtcgtcggtctgttatgtgacctggaaagcattatcgccaattacctggcagacggttataacgtaaaactgggagaactgggcacattctcggccacactgacttgccgcaaggtaacggacaaaagcgagatacgcgccgcatcggtacattttgacaacataaagttcaaacccacccggaaattccgtaaggaggtacgaagcaaaggaaagctggaacgggcggaatatggtttccggacctcctccacccgatattcagcagaagaacgctttgtacggctgacaaattatctgaaagagcactccattatcacttgcaaggaatattgtgccttgacagggttgctgaaaacaaaagccggcagcgaactacgccaatggagcagcgaaaagaaaatagaaagaaacggacgcgccccgcacgtgatatacagggcgatgccggaaggctgaaaaggtatcctttcacctgcttcccccctctcccggaacctttattctttccgggtgcggctggtggctatgagatacgcccccagcagaatcagcggcacactgagccactgccctatgttaaaagtcatatccgcctcttcggcaacctgcggattcttcataaactccagagcaaagcgagtgccaaagaatataagcaagcttactccggttattaatcccaccctcttttgtaaatggtatgtatggtacatcacccaggcagttacaccggcaaccaggcaatacagcatttcataaatctgagtaggatggcaaggcaaaccttcatacagctgatgccactcccgggaacggacaaattcaaatccccaaggcaacgtggtgggatatccgaatatctcggaattcattaaattaccaaaacggatacagaagcagacaatcgccacagcaggtatcatgcggtcaaacaaccaccacacacttttccgggttacttttttcgagtaccacatcagagccagaatgatggcgaacacccctccgtgacttgccagcccgcctttccaaatcttgaatatttcaacaggatgggcgccataatagtcccattcataaaacaaacagtgccccagacgggcgccaatgaccgtactgactatgcaatagacaaaaagcttgtccacccactcttccggatacttctcttttttgaataaacggcttaccatttcataagccaatatgaaaccaaggccccacatcagcccataccaacgcacttcccaactacctactttaaataagataggatccacatcccatacaatacttgctatcattgttctatttctttgtttatgaacacaaaggaaataaaaaaatctcttctccggaataaaacagagaagagattttcagaatatcgttctttttgaggaaacctctttataccaaatgggcaatcagttcctcacggtcgccgcacagcagatcaattacaggaacttcgatcatggtataacatccgggctgctgtttcatggaggcgcgtgccacgcaaaccagcacctgcgcggtaagagccggattattaatcttcatgtcaaactcgaacaactgattgtgagtcttgcccgatacccctttgcgaaccaggttaacgccatgacctacgtcgttcaaatcgtccacacatggaacttgttttacatgtgtctcgtcatttacaaaataaggatccgacttgatggcggcttccacagtcttgaagtccgcaccttcctccagttccacatacaccatacggcgatggataccggttcccacaggaatagtcatggacaaagcatccttcactccatcaatggcacggactgctacggaatgccccatgctgcgtcccggaccgaaattggtataagtaatacccttcggagcgatggcttccagcagtgtacggactacagaatcgcttcccggatcccatccggcagaaataatagcgacagccttaccggcctttgccgactcatccaatgaacggcggagagaagtgatttgcgtatgaatgtcgaaactatctaccgtattgatacccattgccagaatctctttcgcatattcttccacgctacgggtcggagtagccagcacagccacatccacatctttcaattcccttatatctttcaccacagcgtatgcttccaactcggcaggcttgttttccgcaccgctacgacggacgatacctgcaatctcaaaatcgggagcagcttccaaagcctccactacatactgaccaatgttaccgtatccaaccacggccgctcttatttttttcatcttttattgggtttagtttactattatctgttaattcgctgcaaaaataaacattttgcctcgtttttttgttcactacgacctaataatttaaaaatattcttgccgaacttataatttaaaagatagatgtcctatttttgcaaagaactgtaaattttcaaatgaaacaaccatgatagaatatattaaaggagacattgcggagattactccggcaacggtggttttagattgtaacgggatggggtatggcatcaatatctcattgaatacgtattcggccattcagaatcagagcaatacgaaattatatatttatgaagcgatccgggaagacgcctacgtactctacggattctcgaccaaacaggaacgggagttgtttttgttactgatttccgtatcgggcatcggcggcaacacggcacgtatgattctgtcggccttatccccttccgagctgtgcggagtaatcagttccggtaatgacaaattattgaaaacggtaaaaggcatcggcctgaaaactgcccaacgcatcatagtggacttaaaggacaagatcgccacttcgggcgtggagacggtgaacagtgaaatgtttgccaatccgggcaatacggaaattcatgacgaggctgtcgccgcactcaccatgctgggattcgcacaagccgcatcacaaaaggtagtggctgccatactgaaagaggagcctgccgccccggtagaaaaagtgatcaagctggccttgaagcgattgtaagggccgtacatgaaacaaggaacacggacaatgcggactttggggaggttctcttcaggatccgcattgtttgtgttcccatccacatcacttctcttcctcctgttcctgcattttgcgggttacaaactctattttcaagttcgcttctttcttatctttacggatttgttccatgccggacaggatgcgcgccaactccgtcaattctgcaatcgccttacggtcattgggttgcatagccgttttataagtacgatctccgataaactgaagttggatattcttatctttgttcgctacaataaaagcgataacgccgccgtcttcccccatcttgtaatcggccttctcgattgcacggcccaagtcagtggtttcatagctgtctttcgaggcgggagtttcggcaaaggtatcccccacactcactttcaccgccgtgtgatgcaacgtgccgccagcacaataaatagaggtaagggacatttccccctgctcgttcacttgcccgcgcaagaatgaacggcctatattcttttctactgtctgggtgggataaaaatagttacccacctcctgatatgcagtatctttctcaagaacaaaattacccttgacggaatccagctgagcttgtttcaccaccatcatgctatccaggtaaatcagacttttccgctgttctttcaaatccacctgctgcatcagcttgactccctgttttctggcttcaaacgctttcggataaaggatgcggatactgtctatctgcaatttggcctcattaaagttctctttttctaaagccgcttcggccttacgcaaattttcttgcgctttcttctcgccgccatcatcacaaccggccagcaacaaggcaaataatgctactaatcctatctttttcatgtacttgatcgttttatatgcaggcaaaaatacaatttaattgcgtgatttctccttatcctgcgcaaaaaatcgtaaatttgcccctctttaagatgaatatggaactaaaagaacactttaataataagatattcaagttaatctccgaaacggcagacgaactgggattggaatgttacgttgtaggaggttatgtacgagatatattcctgaagcgtccctcgaaggatatagatgtagtcgtagtagggagcggaattgaaatggcacaggccttcggcaggaagctgggacgtggggcacacgtttctgtttttaaaaacttcggtacggcacaagttaaataccatgacacggaagtggaatttgtcggtgcccgtaaagagtcgtacagccatgacagccgcaagcctgtagtagaggacggcaccttggaggatgaccaaaaccggcgcgatttcacgatcaatgccatggcagtgtgcctgaacaaagcacgtttcggtgaactggtagatccttttaacgggctggacgatttgaaagagagaactatccgtacaccgctggacccggacatcactttcagtgacgatccgctccgcatgatgcgttgtgtccggtttgccacacaactgaacttctatattgacgacaccactttcgaagcactgtcacgcaacaaggaacgcattcatattatctccaaagagcgcatcgccgacgagttgaacaagatcctgctcgcccccataccgtccaaaggctttatagaactggaccgctgcggactgctgcctttgattttccccgaactggtggcgctgcaaggagtggaaacccggaacgggcgtgcccataaagacaacttctatcataccctggaagttgtggacaatatttccaaacataccgacaacctatggctgcgttgggctacgctgttgcatgatataggcaagccacgtaccaaacgctgggagccacgtataggatggactttccataatcataactttatcggtgagaaaatggttccggatctcttccgcaagatgaaactgcccatgaatgagaagatgaaatatgtccaaaagttggtcagcctgcacatgcgccccattgttatcgcagatgatgtagtaaccgattccgccgtgcgacgtctgctttttgaagccggagatgatattgacgacttgatgatgctgtgcgaagcggacatcacttcaaaaaatgaagcacgaaaacaaaaattcctggataacttcaaactggtacgccagaagctgaaagacctggaagaaaaagaccggatacgcaatttccaacctccggtagacggagaagaaattatgcggatattcgacctgcagccctgccgtgaaataggcagtctgaaaagttctatcaaggatgccatactggatggaatcatccctaatgagcatgatgctgctttagaacacatgttgaagaaagcaaaaagcatgggattaactccaaaaaacttataagaaattgaccatacactataccaaaggagaagagtgggccaataccctgtcacatggcgttggtatcctgataggtatcgccggcggcggttatctgttgcttactgccatgaaaagtggcaatccgtgggcaacaggcggcatgtggctctacctattcggtatgctgtcttcctatatcagctccacctggtatcatgccagcaaaccatctcctcaccgcgaagtgttgcgcaaattcgatcatgcttcgatttatctgcatatcgcaggcagctattcccccatcatgctgatagccttgcgggaagcagattattggggatggggaattcttagtttcgtatggctatgcgccctcgccgggatcattctatgtttttgtaacctgaaagaacatagcaacctggaaacaatttgctatatagccatgggatgcagcatttttgtaggtttcaagccgctctgccaacatgtgcctcccgcttttatttattggttaatcggtgaaggagtgtcttacatcaccggagctgttttttattccttccccaaattgccctatatgcactctgttttccatctgttcgtattaggaggaacggtctgccacatgatggcattgtggtacattttataaccttcccatcttcaataagttatccgttttggaaaacttttatccattttttaaatagaaagtttcccaaaatgttatacctttgcagctgtccgacaaggtgaagttaaccacttccaagagggaatgccgtgaaaatcagcaacagtacccgctgctgtaattctcgtagagctgaaacaatatgccactacaaaaccatttgcgggaaggcgttttaagggagagataagtcagaaaacctgcctggaaggacagccaagttttttaaattaacaattaatttttcaaacaatgaattacgctgagatttgtattattaagcgtgatggaaagcgggaagacttttccatcagtaaaattaaaaatgcaatcggcaaggcattccatgcctccggaattgacaatgaagacaaactgattgctgaaattaccatgcgggttatcagcaatttcgtatctccaaccatcagtgtggaagagattcaggatctggtagaaaaggaactgatgaaagtacgtcccgaagtggccaagaaatatattatttatcgcgaatggcggaatacggaacgcgaccgtaaaacgcaaatgaagcacatcatggacggcattgtagccatcgacaaaaatgatgtcaacctgagcaatgccaacatgtccagccatactcccgccggacagatgatgacttttgcctcggaagttactaaagattatacctataaatacctgttgcctaaaaaatatgccgaagcacatcagttgggcgacatacatatacatgatttggattactatcccaccaagactaccacttgtatccaatatgacctggatgacttgttcgaacgcggcttccgcactaaaaacggaagtatccgtactccacagtccattcaaagttatgccactctggccaccatcatattccagacaaaccagaacgagcaacacggcggacaggctattcccgccttcgacttctttatggcggaaggggtacggaagacatttcgcaaacatctgaaaactttaaccgagttttatatagaagtagagggaaaagaacccggaacagaggctctcaagaaaattgaagagaaagcatacgccatgacacgcaaagatacacatcaggccatggaaggattcatccacaacctgaacaccatgcattcgcgagggggaaatcaagtcgtgttcagttccatcaattatggaacagacacttctcccgaaggccgcatggtcatagaggaactgctgaaagctaccatcgaaggcctgggtacccgtggcgaagtaccggtcttccccatacagatattcaaggttaaagacggagtatcttattccgaagaggactataagaaagccatggaaaacttcgaagcggcactggaaggcaaaatggaattccaagctcccaatttcgacttgtttctgaaagcctgccgtaccaccgcaaaagccttgttccctaattttatgtttttggatactccttataacaaaaatgagaaatgggatatcaaggaccctaaacgttaccgctatgaactggcaactatgggatgccgtacccgcgtatacgaaaatatagcaggtgaaaaaagttcattaggacgtggcaacctgtcattcaccaccatgaatatgccccggctggccatcgaagcacgcatcaaggcagaaagtctggaagagtcaggcaagaaagaggccatagaaagaaaagcaaaagaaatattcatggaaagtgtacatgctttgtccgaactgattgccgaacaattgtatgcacgctaccagtatcaacgtacagccctggcacgccagttcccgttcatgatggggaatgatgtgtggaaaggcggaggaaaactttcgcccaacgaccaggtgggggatgtattgcgtcaaggcacattagggataggctttatcggcggacacaatgccatgatggctctttatggagaaggtcacgcacatagccagaaagcatgggatacattattcgaagccgttacggaaatgaataaagtggcagatgaatacaaacagaaatatcagttgaatttctccgtacttgccactcctgccgaaggactttccggacgcttcacccgtatggaccgccgcaaatacggcatcattcccggcgtgacggacaatgactattatgtaaactctttccacgtagatgtaaaagagcccatcaccatcaccgagaagataaaacgggaagctcctttccacgccattacccgcggagggcatatcacttacgtggaactggacggagaagctcagaaaaatgtaaaagccatagccaagattgtaaaagtaatgcatgacgaaggcattggatacggttccatcaaccatcctgttgatacttgtcaggcttgcggttacaaaggagtcatttacgacaagtgccctgtttgccagagcgagaatataatgcgaatgcgtcgcattaccgggtatttgacaggcgacctcagcacttggaattcagccaagcgtgctgaagaacgtgaccgggtaaagcatggataatcagcatgaacttgttatttacctatcctgaaacaatagtcgacggtgaaggcatccgctattccatctatctggccggatgccgtcaccattgtcgcggttgccagaatcccgaatcctggaatccatcggcaggcactccgctcacaccggaaaaaatagaaaaaatgatctgcgaaataaatgccaatccattattggacggaatcaccttttccggtggagatccactttatcatccccaagaattcctggctctggtcaaacagatcaaagaagctaccggacaaaacatctggtgttatactggatatacatttgaacagatacaaaacgatgaaatgttaaaaccgatactggattatgtggatgttatagtagacggacgatttgagccggatttgtactctccttacttggaatttcggggcagcagtaatcaacgcatcatccgtgtgcgataacgctaaaagaaataaaaaaggggtgttttcttgatatatatcatgaattcacccttttttatgtttttcagcatatatttacttgctaatttcaagaaaagccgtacctttgcaatgtggttgtgaaaccaaatattaagttaataaagaaaagaacaaaattaggtattaagtattaaggtaaagattttaatttaaggtattagatttaggtaaagaaagattgatttagaaaggtattagtagtaagatttaaggtaattagaaaaagaaagttttcaggagattagttttataggtattaaaagagttgtttttttaggtacaagagagagaggataacacaactgagacgagaaagatgaaaagaaccccataatggaggggggttcttcaggatgtgagcgggtttgataaaaactttcgctctttttttatgtctttttttcaccacgggagagaaacaatataaaaaacgcagatttccgcaaagacgattgattcaatctttgcggaaatccgtgcctatcggcattgttataaaaatgccgtgtccttttctgtcatgcagacctagaacaagaatcgcatgatatcattaaagttcgcccaaatgagcaaggcaaacagtaaaaacatacctaccatctgtgcatattccataaacttgtcactcggcttacggcgggcaatgatttcataaagcaggaataatacatgtccgccatccaatgccggaataggcagaatattcataaacgcaagaatgattgacagaaaagcagtcatttcccaaaaacgatgccaatcccatactttcggaaaaatacttcctatcgttccaaaaccacctacgctcttggctccttccttagtgaacacatatttcatatcgttcacatatcccttcaacgtatttacccccaattgcaccccggcaggaaaagattcaaagaaaccaaattcacgggttgtttctttataatcagccaatgaagagaatgttgcacccactctaaacaaagagtctgtacgcaccgtcacggtgtcacgcagtccgttacgcgaatataccatttgtagagaagcatctttatctcctgtagcttccgcatcagcctgcatattatccagtttttccaccaatgcattccatgagttcaacctctcgccattgaccgcgaccagactatctcccttctgtataccggccttatccaagccaccgcccggtatcaccgagtcaacgacattaggaactaacgccgtaacaaacatcggatcatcctttgctatatccaacaagctgatctcaggcatatatacttcggcttcctttccgtcgcgcaatacagtcactgtacgtgcctcagcaatatcacgaagcatatccaccccgaaacgctccaatggtttttcatctgcacgaagaagaatatcaccgtcacggaaacctatttcccgggcacgctcattaaatttcataccatgagtcatgtcttgcagcgatacaaaagaatctccccaatggaataaaatcatggaatagatgaagatagccagcaagaaattcatcaagacaccacccaccatgataagcagacgctgccaagccggttttgaacgaaattcccatggcttagcaggctgtttcatctgctcggtatccatagactcgtctatcatacccgaaattttcacatatccccccaaaggcacccagccaataccatattccgtatcactgttcttcggtttgaatttgaacaaagaaaaccacggatcaaaaaatatgtagaacttctctactcttactttaaaaagacgtgaaaaaagaaaatgtcctccctcatgaataatgaccaataatgaaaggctcattatcaattgaagagcacgaatcaaaaatgtttccatctaactatttactattttataatttataattaacataattctctgccaactaccatttaagatgacaaaagggacaacgctacccgacgcgcctcagcatcagtatccacatagtcttcataagtcggttccttgatataagcaactttacccatagtctgttctatgacatcactcatacccaggaaagatattttgtctttcaggaaagcatccaccaccacttcattagctgcattcactatacagggcatatttccggcccgatacaaagcctcgtatgccaatgccaaattacgaaaacgtttggtatcaggctgttcaaaagtcaggtctgttatacgggcaaaatccaaccgctcgaaagaagatttcacgcgctccggatacgaaaaagcatattgaataggcaaacgcatatcgggcatacccaactgtgctttcacggccccatcctcaaactgcaccatagaatgaatgacagattgtggatgaactaccacttcaatttgctccggacgcattccgaataaccatttagcctcaatcacttcaaaccctttgttcatcatggaagccgaatcaatggttatcttcgctcccatctcccaattgggatgcttcaaagcttgtgctttggtcactgtttgcaactgctccatggtataagtgcggaacggccctcctgaagctgtcaagatcactttctccaaccggttatttatttccagacactggaagatagccgaatgctccgaatccacgggaagtacaggtatatggtactgatttgccagtgcattaatcaactccccggctacaaccagtgtttctttattagccaaagcaatagctttacctgcctttatcgcatttatagtaggacgcaatccggcataccctaccatagaagccagtacaatgtcaataggttgtgattccacaatttgagaaagcgcatccgctcctgcatatactttgacaggcagatcactcagcgcctctttcaattgaaggtatttttcctcattggctatcactaccgcctcgggcatgaacttacgggcttgttctaccaataaatcgaccctgttattggctgtcaacgcatagacctcatataaatctggatgttcctctattacctgtaaagcttgtgtaccgatagagccggtagaacctaatatcgctatttgttttttcataatgttgttaaaatacaatgtattttgagggatcaatcgcacgtcccttatgccataattcgaaatgcagatgcggtccggtagttttttcaccggtatttcctaccaatgcaatagcttcaccacctttcaccggatctccttctttctttaataacgaaccacaatgtttatacaccgacacaaaatcctgtccatgctgtatctgaataacataaccggtttctgccgtataagtagacaaaatcactgtcccatccaatgttgccaacacactttcatttggattagcggcaatgtccacaccgtaatgcctgttctccaagtcaaaattagatgacatcatgccccgtgtaggacgatagaatatcaatccggaagcggcattattatcatcaacagccgtcagattatatcgttccgattcttcatattgcttgcgaaactcttcttcctgcctggtacgttccatcaaagaatcagaacgaagaatggtcagagagtcgatagattggactgtatcagcttttactttcccgctaaatatatcctgaatgttcatgatatacatattctgcctcgtcaccacttgttgtaatgaatcggcccgcaaggcattggtcaccacctgcgcacgtacctcactgttcatatatcccggcaaatagttacgtaaaggagtaaaaacaatgatagttgccgaaatcaggaaaattaccgttacggcagacagcaatacagacacaccattgagtttggaaacgtgcagtcccacaatctcctccaacgtattttcattggtaatggtcagtttatacttaaacttgaaattatgccaaaatgctttccttccttttttcttcattgtgcgcaccttctatatttatatcaagccatcaggtacttcgaccgtcagcaaacgctttttcttatccaatttgatgataaattcctcgtgggcaggcagcaaaagttcctcgccatccttctcaatggcaaaaaggacattcatcgtactgtcatccaccgccacaatctcgcccaactcaccatgattcacatcttccaccttaaagccaataaaatagttccaggtaggtatatcatccgaatcttcctcctcaccgacatatttcttcgggaaatagacctctacattcgtaaacatacgggccttttccgaggtatccaccccttccagtttgactaaagcagtggtatctgaacgaaaacgatactcttcaataaagaaaggcacgaatataccgtctaacaaacagaccagatactcacattccacacggtcaaaaatatcatccgtaaaagtgaatgagatttctccttttactccatgcggtttgttgaatataccaatcttgaaaacttcatctttcttaatcatgattgatttctctaaattctagtaatacgtgcgccaagcgcattcaaacgctggtctatattctgatatccccggtctatctgctctatattgtgtatgcggcttataccgtcggcactcattgccgctatcagcaaagcgataccggcacggatatcgggtgaaatcatatttccggcgcgaagctggaaattacggtcatgccctatcacaacggcacgatgagggtcacataatataatctgtgctcccatatctatgagcttgtccacaaagaacaggcggctttcaaacatcttctgatgaatcagtacactgcctttcgcctgtgtagccaccaccagtaccacactgagcaagtcgggagtcagccccggccagggagcatctgctatggtcataatagagccatcaataaacgattcgatctgataatgttcctgctcggggataaacagatcatctccccgctgttccactctgatacctaaacgacggaaactttctggaataatgcccaaattttcatgcgatacattcttaatggtaagctcacttcctgtcatagctgccattccgataaaactacctacttcaatcatatcaggcaacacccgatgcgtacagccatgcagactttccactccttcaatagtcagcaaattagatgcaataccggaaatcttcgcccccatgcggttcaacatacgacaaagttgttgcagataaggttcacaagctgcgttgtaaatggtcgttttgcccttcgccaggacagaagccatcacaatattagccgtaccggtaaccgaagcttcatccagcaacatataagtaccttccaaatgctctgcgcaaatactgaaaacacttcgttcctcatcataattaaaacaggctcccagtttctgaataccgataaagtgagtgtccaaacgccggcggccaatcttgtcaccgcccggttttgaaatcaaagcctttccaaaacgggcaaccaacggaccaaccaacatgactgatccacgcagactggaacatttctttaagaattcatcactctccaagtagttcaaatccacagtgtcagccttaaatgtatacgaatcaatccctgtttttgataccttgacacccatatcacgtaacaactgaatcagattgttcacatccagaatgtccggaatattagttacggtcacttcttccgaggtcagcagagtggcacaaagaatctgtaacacttcatttttagcaccttgcgggtgtatttcgccgtgcaatttatgtcctccttcaattacaaacgaagccatggtatcattttttaggaattaatatttctttctttggttgttgttttgttgcggtctgcgctgattgttgttctgttgcggcctgcgtggaacataaacacgttgctgttcattcaaatgcaggtcttcaggggtcagattaatcattcccttagagtaatcgcgaagatcatccaagattttctgatcctccaccccgtctttgttccagttcaggaaacatttcttcatgtggtttgcaatcaggctgatcagctgcttcttctcctcaccttccggatagtccactgcctttttaatcatgttctccaaaatacgtccataatgacggtaacggattccattatgcggataaggcaacatatcgggtttcacctccaggctttctttcttcacaatttcatacggataatcgatatccagcttgaaatcggccataatagccaaatgatcccataatttatgtttgaaatcgggcacatcccgcaaatgcggaaacataccgcccataatgttgataatcgtattcgcacaacgttggcgctcagctctgtcctcgatggtcaaggcgtggtctaccatgttctgcacacttctgccatattcaggaaggggtaaagttcgttgttgagtattatactccatatatatttaaaatttatgatttatgcactgatttgttcatcggctgttacaaaagctttttgggtttggaagctacaaactctttcaaatagaaaggctcaaaataagccacatccttaaagttctgccttaccatttccttttctgccaatgggaacatccatttacctaacggacggatgtcatcaataaaatgagcattgggatgagtaatctgcccacggcatttggctgcaccgttaccaaaaaaatagaccggatgttcattcaggaactccaaataggaatgctcatcaacaatatcggcggctatttcccttttcacgcccaatgcgcgatcataaacagctgcatagacttccatgcgacgtgcgtctatcataggacagagcaaggcatcctcaggcaaatcatgatgtaacaacaccggcacacacaacacctccaatgtcggcagaccgataagtggcaaattacgtccatagcaaatacccttcgccatagaaacaccaatacgcagccctgtgtacgagccgggcccgcaactcacagccactgcatccaacggcataccatgactgtcgacaaaagataaagcctcatctacaaatacgcccagctgcacggcgtgtgaaggtcctttcaaatcctctttggagaacaccgccaatccatcctcactgacggcaacagagcaggcctctgttgaagtttcaatatgcaaaatacacgacataatgctctacttatataatataatctgcaaatatacacttttatttatacttcatttccataaaaagattacttttgcaaaaaaacatattagttatgatacagtcaatgaccggatacggtaaagcaaccgctatattcggagaaaaaaaaattaacgtagagatcaagtctttaaatagtaaagcaatggacttgtctacacggatcgctcctttataccgtgaaaaagaaatggaaatccgcaatatgatttccaaatcattggaacgcggtaaagttgatttcagcctgtggatagagaaagacgtttcggatacagccactcccattaacgccgcccttgtagaaaactactacaatcagataaaatctatttccgaaatgacccatataccaatgcccgaagattggtttgcaacccttctacgaatgcctgacgtactgaccaaagccgatgtacaagaactttcggaagacgaatgggaggtagtccgccgggtagtggaagaggccatcaaccatttggtagatttccgcaaacaggaaggaaccgccttggaaaagaaattcaacgaaaagattgacaacatcgagcgtttgttaaagtccatcgaaccctacgaaacagagcgtgtagccaagatacgtgaacgcattacagatgctttggaaaagaccatcagtgtggattatgataaaaaccgcctggagcaagaattgatttattacattgaaaaattagatattaacgaagagaaacaacgactgagcaatcacttgagatatttccgtgaaaccatggcaggcggtcatggacaaggaaaaaaacttggtttcatagcacaggaaatgggacgcgaaatcaatacgactggcagcaaatccaatcatgccgaaatgcaaaacatcgtagtgcagatgaaggacgaactggaacaaatcaaagaacaggtgttaaatgtaatgtaaccggttcacataccggacaccattctcataagcaaagaatcaagatatggcaacaggaaaacttatcattttttcagccccctcgggttcaggcaaatcaaccattatcaactatctgttgacacaaaacctgaacctgtctttctctatttctgccaccagccgccctcctcgcggaaaagaacggcatggtgtggaatatttcttcctatctcctgaggaattcagacaacgcattgccaataatgagtttctggaatacgaagaagtatacgaaaaccgtttctacggaaccttgaaagcacaagtggaaaaacaattggaagccggacaaaatgtgatttttgacgtagatgtggtaggcggatgtaatatcaaaaaatattatggcagccgcgcattgtctgttttcattcaaccacccagtgtagaagaactccgtaaacgcctgcaaggccgtggtactgatgcccccgaagtgattgaaagccgaatcgcaaaagcagaattcgaattggggttcgccgataaattcgataccgtgatagtaaatgacgatttggagaaggcaaaggcggaagcactgaaagttattagaaactttattgaacaataagacgatgatcaaagatccgaaaaaactggcccaaagaatgtcgatactttgtatcctcattggttttatagctttggctgtaggcatcattgcaatggcaatggagcaatacattattgccatagcaatgggtattgtcactgtaggacaagtatggaattacaataaatggaaaagagtaagataaagactggtattttcggcggctcattcaatcctatccacatgggccatctggcacttgccaattatttatgtgaatataatggactggatgaaatatggtttctcgtctctcctcacaatccattaaagcaacaaacggatttatgggatgataatctgcgattggaactggtaaaactggccattgcggattatcccaaattccgggcttccgacttcgaattccacctgcctcgtccttcctatactatacacacattggatgctttacacaaagcctatcccaaccgggaattcacccttatcattggggcggacaactggcttctattcccccgttggtacaaagcagaggagattttaaagaatcatcatgtaatgatctatccccgtccgaatttcactattgatccaacaacccttcctccttccgtgcaattagccgatactccgttattggaagtcagttctacttttatcagacaggcactggcggaaggacgagatatacgatatttcctgcatccggcagtatatgaacgactgaaaaaataaaaatccccgggaggatacaatcctaattccccggggaaaaacacatcaattatttaatctaaaattcaaaggacgcactccattaacgctttgccagcagtaccttactatttatcaatccgtccaactcccagcctgtcgtatcctttttatatgagtgccacgccaaaaacttcccagcttcatctaacgtatatacatatttctgcgtagggacaaacgcttttttatttttattccacaaagaataatcaatatgcgcttctgtgtctgtgtacgtaacttccatacaataataatttatccaatccgtgccattccatttcatacttttcttctctatgatttgtcccttatcgttgtatctgaactcaaaacgatactccggagtcaggaaagtaccttcctgttcataaacgaccttagccgacacccgaccattttccacctcttcatttgtaatcttcacaggcttggccgcattcaatgttaatacacttgtcattgcaaaaagaactgccatcatggctttagtgagcattgtagttttcataatgtcttatttttaatgtttataattcgtgtttatttgtgtctttatttataagacgcaaatgactctcaaaacgttgcaacatgatccgttttttttcttgagtcgcttcactttataaagtgcaaagttacatgccatggaattaatccactaagtatcaacaagtaaacataaaaaagggtgtccgattatggacaccctgtacattattaacggacaaacagtctattctttctgcttttcaacacgatgcaagactaccagaacaacttcgctgggagtaaataaacggacgtcaacgcgcgaagtacccaatccattggttataataatcggagtacctttgctattctctttccaaccagtcagaaaacggtttccataaatagagtgctttaccggagaatattttttaaacaagctcacctgcccaccatgagtatgccccgctaacaccaaattggcattcgacacatcggtatcttctgcataatcgggagtatgcgtgagcaatataataaaatcatccgccggaaaatgctgggatggagagtcaccattcttttttaaatcaaacggattgcgtacaccgctcactataatatactgaccatctttcatcagcttatagcttttatgttccatcaaccgcacatgattcttttgcatggcctccaccacttcggaataacaatagccataatcatgatttcccatcacagcaaatgttccgtaaggcgtataaactctgctcaaggcggtgaacaaagtatccagatttccacctttcttgccacgataatctccacccaacagcaagacatcggcatgcattgactttaatgcccgcaccgcgctgttcaattcactcctcttaaagcgactctcataatgaaaatccgaagcaaaccctatccgaaaaccgtcaaaagcgggtggaatatcataactataaaaatcatattgcttcacacgccctacccccggaaactcggacaaagtagctgtggcgcaagaagacaaaagaataaccgctaaaagcaaaaaaagaaactgtttcttcataatcctttctatttggagacaaagatacagaattaattgttttatctttgcacaaccttaattataaatagaaatggaaattgttcaagttaactcaataaaagcatggcttctagccgcccgccctaaaacattggcaggagccgccactccggttttactgggatgtgccttggcctatgcagacagctgcttccaaatgacaccagcattgctttgctttgccttcgcttttctgatgcagatagacgccaacttcattaatgattactttgattacctgaaaggcagtgaccgtgaagaccgtttgggtcctgaacgtgcctgcgcgcaaggatggatcacactgaacgccatgagaaagggaatcgccctgaccacagcaacagcttgtttagcagggttatgcctattagcttatggagggattgaaatgattccagtaggaattttatgtgttttattcgcttttctttatacagcaggaccttatccgctagcttatcacggatggggagacatacttgtcattgtctttttcggatttgtaccggtaggctgcacttactatgtgatgtgccgtgactggacttggaatgtgacactcgcctctctagcttgcggactgattatagataccttgttgatggtgaataattaccgtgaccgcgatcaggatgcaaaaagcggaaagaaaacaatcgtagtacgctggggagccaatgcagggcaacaattatacttatttttgggattggctgccgcatggctttgtttattgtttatcccgaccgggcacatttgggctgcattattaccccaaatttatctgttacctcacttcatggcatggcaaagaatggtaaaaatcaacaggggaaaagaattaaacagcatattgggagaaacctcccgcaatatgctgctattcggcgtattactagcattcggccttatcctataatcttccagcaagatcttgccagaagatatttcccaataaagcgcaacaaatcattccgctttctctatcaatacagtggcataagcggaaatgccctcctccctgcccgtaaatcccagtttctctgtagtggtagcctttacggaaacatcatccacatcaatcctcatcaaatgagcaagtaccaactgcatttccggaatccgcgctttcaatttaggacgttcagcacaaatcgttgcgtccacattacctactttatatccttttgcagcaatcaggtccaccgtttcagccaataaaatcttgctatcaatattcttgaattcacccgcagtatcaggaaaatgataacctatatcacgcatattggcagctcccagcaaagcgtcacaaatggcatgaatcaacacatcggcatccgagtgtcccaatagccccaattcatgttcaaattttattcctccaagccatagttcacgaccggttaccagttggtgcacatcgaatccaaatcctactcttattttcatcttacataaaaatctaataatttctcaccttccaaatacccctgcaaatgctgtcctatgccgactggccctactcccacaggagtccccgtatagagcaaatctccaatctttaatgtaaaaaaccgactaacgtatgcaattatctcatccaccttaaacaacatatccgcagtgttgcctctctgcactgtttttccatctatatccaaatgaaagtttaaattctgtatatccttaaatctgtctaccggcacaaaatcacctatggcagccgagctatcaaaccctttacacagctcccaaggcttgccttcctcccggaaccgccgctgaaggtcacgtgccgtaaaatctattcctaccgtcaccgcatcataataccgactggcaaaacgcggagcaatattctttcccaaacgattaatacgtactaccaattctgtctcataatccacctgctgagaaaaatcaggaataaaaaacggcttgctgtctttcagcagagccgaatccggtttcataaaaataaccggttcttccggtaatttttcatcagcatgtaactcgtggcaatgtgcaacgtagttcattcctacggctataatcttcatattattattcttgaattacatttaatctgttaaacattacagccagatgagcataaagtgatgtattctgcaccacaatattttccggtacacgaatacggaacggtgtaaagttccaaacagccttaatgccacccgctatcattttatctgttatctcctgtgctatattaataggcacagtcaataccccgatattcacatcacaggatttcatttttatctcaaattcatccgaatgataaataggaattccatttatttccttcccgaccaatccgggattaatatcaaacgcacctactatctctaatccaaaatgatgcagccccgagtcgcgcaataaagcacctcccaaactaccgacaccaaacaaaaaagctttatgcattttggtaaatcccaagaaacgctccagcacctctatcaacgcatcaatctcataccccacacgtgtacggccggatatatttacataagaaagatctttcgctatttgggaagcatctacattgatttgcttggatatttgggtagaagacacgtacgtttctccctgttctttcatcagtttcacattcgaaagataccacggaagtctgcgcaaagtcggctcaggcactttatccgagaatttatgcatacgtatatccatctttttctttaggtattatcattaggtaatttgcaaaagtacacttttatttgttacattgacggatagagtataaaaaaagtcttatctttgagtattcatttaagcaaaattcacatgaaaaataacgattggaaagaacgtctgaatgtggtttattccacaaatcctgatttcaagtatgaaagtgttgaagaggaagcggttgagacattagataaaaaacaacagaaactccgtgtcaatatagaaaaaaaaggacggggtggcaaaaccgtgacattaatcaacgggttcatcggaacagaaaatgacctgaaagagttgggtaaattattgaaaagcaaatgtggagtaggcggttcagtaaaagacggggagatccttatccaaggagagttcaagcaacgggtcatcgagttattgaaagctgaaggatatacccagaccaaataaccggaaaaaagaaagggactgttgtcacacagtcccccattctataattgcggaaatcttattcagcacgtaaagtgaaacgtttgaaagcaacgatctgcaattcaggatcagcttccttcaacacttctcttacagtcttcttaccatccatgatatcctcctggttcagcaagcaaacttccttcaagaacttacccagacgacctttagcaatgttttcaatcatctgttgcggcaagttggcagctttttcagcagaaacagtagcaatgatttccttagctttggcaatatcttcgtcagtaatccagcccttagccttgttactttccatgtgctcttcgctgtctacatgtgcagggttgataccagccttcttcaaagcaacttcaacagccttgtctacttgttctttcttagttttatcaatagctacctgtatttcagcttcttttacagattcaggaacaccggcttcatcaattgcaataggattcatagcggcaatctgcatagcaactccgtgagcggcagcttcagcttccttattcatggcaacaatagtacaaagctggttatttccctggtggttataaatagaagtataagcaccttcaaccacattgtagccatccaattccattttttcaccagtgataccgctacggtctgttactgcatcctgtacagtaccgttacccataggcaaagcctttacttcttccaaagtcttgcatctgttggcaacagcagcatccagaatagcttgagtcaacgctacgaaatcagcatttttagcaacgaagtcggtttcgcatttcaaagcgatgatagcagcaaattcgccatccttttttgccagcacacaaccttcagatgcttcacggtcagaacgttttgcagcaacagcctgtccttttttacggataatttccattgctttatcgatatcgccgtttgcttcagtcaaggcgttcttgcaatccatcataccagctccactaatcttacgaagcttggttatttcagccatagttacagccataatattcctttattttttaattgttagtaatatctttaaaacagaattgagaattgaaaattgagaattgagaatcaacagcataatctgccccttccccaattttcaattctcaactctcaatttatactattaagcttcttcgtcttctttcaagaaagcggcagccttagcagcattgatagcttcttcttcggctttatccatacgagccttggtatttttcttcttaccagcacccttaggagcattttcaccggcagcttccatatctactttttcagcttttctttcttccaagccttcagcgatagcgccacaacaagcatccaagatcacttctacagacttagtagcgtcatcgtttgcaggaatcacgaagtctacgtttgaaggatctgaatttgtatcaacgatagcaaatacagggatacccagacggttagcttcacgaactgcaatgttttctttcaacacatcgataacgaacagtgctgacggcaaacgagtcaaatcagcgatagagcctaagttcttctccaatttagcacgctgacgagagatttgcagaacttctctcttagaaaggtttgaataagtaccatcgttggtcaacttatcgatagtagccattttcttcacagccttacggatagtcgggaagttagtcaacataccacccggccaacgctcgattacataaggcatatttacagaagcagctttctcagctactacttgtttagcttgtttcttagtagcaacaaacaggactttcttacctgattttgcgatttgtttcagtgcatcagcagcttcatctactttagcaactgttttatggaggtcaatgatatggataccattgcgttccatgaaaatataaggagccattgagggattccactttctcttaaggtgtccgaagtggcaaccggcttccaataatgtatcgaaattagttctagacattttgttattctttaaatcgtttactttcttttttgtttatctcaaccaaccatcgggtagtccgctaccaagtagagtcccgctggtttagatactaaacgcttcttaaccagttccaagtaaaaccggatattaacgtttactgaactggaatctacgacgtgctttgggctgacccggtttcttacgttctacagaacgagaatcacgtgtcatgaagccttctgaacgaagagctgttttatcttcagggttgattttaaccagcgcacgggcgatagccagacgcaaagcctgtgactgacctgtaaaaccaccaccgtaaagatttactttgatatcatatttttcagcagcctccagcttgttcaaaggctgttttactacatactgaagaatagttgatggaaagtactgtgcaaggtctctcttgttaatagtaatctttcctgtaccttcgcttacgaacacgcgtgctacggcgcgtttacgtctgcctaatgcatttactacttccattctttattatttaagtgagtttatatcaattgatttcggagtctgagcttcatgtttatgttcactaccagcgtaaacatacaaattgcccagcaactgtgctcccagacgatttttaggaagcataccctttactactctcttcaacagtttttcttcaccgttaggtttcttcatcaactgggcaggagtcatttctctctgaccaccgggataacctgtatagcgcaagtaaaccttgtcgttccacttgtttccggtaaatttcactttgtctgcattaatgataataacattatcaccgcagtcagcatgaggggtaaagtctggtttgtactttcctctcaacagtttcgcaactttcgaaccgagacggcctacgacctgatcggttgcatcgacaacaacccattctttatgagctgtttctttgtttgcagaaatggtcttgtaacttaaagtatccactcttaaattcttttttaaatgttaactactaaaaaacaattcttcccagcgtttctaaccgttcccggacaaagaactattaacacgctaagaattaattctttataaacttttgataataatcggcttgcaaaggtacggcttttctttgaactgacaaacaaattaagatattttttcctcctgctttttgcatacaaaaggctgatacaaccacatctaggctttgaataacggagtaaaaacatagggaagaaattttgattcttccctatacatatacagttattcatatattttcaacgattccagccactctccatctcagagcaagtacaaacagccacagatgccgcattgtttccaccggactgacgaagctttaaaagttcagttgctgagatccgaactacttttccatcgggacgaccataacacagtgtcccttcgcgccgtgcagtttcctctatcaaccgctgttccgctaattctaaaccataacgcaacttcgcacttaattccttatattcttcttcagttgacataacttctgattttagtaaaaagttcttgattatagatatggacctcatctcccaaacggaaggcgtccgccacaataacacgcggtgtgcagctattgtccgcaagcatccaataatccacgcaaggcatataaatacggaaaaagttttccaaccccgaacgataacgacgacggataatgggagcaggtacatcatgccctccgttggcaacacgctgtttcactcgctctatagccagttcaggcgaattcagccaaaaataaataaggctgacactatatccttgattttgtgcctgctggataagattgatataagaacgggtagacaatgtagtttcaacagaaaaactgactccggctgacaacagttctccgatgcgtttcagcatcagtcgtcccgcttcgattgctacacttgaggggttaaaaggagaaagtcccttggcgatttcatcggcattgacaaattcacggcactctaaaatttcgggtaataccgtatacgaagcagtcgttttaccagctccgttacaccccgctattatataaagtttagacattaatctccttttctatttctgttattggcgacaaagttaacgattatttccaatttttgttctcgaaaaggcataaaagtgatgaagaatagcacattttttgaaattctgtgcaaattaagaagagattacaggaattttaccgtatatttaagcaacctgcaaacaggtaacagttactcactacatcattttattggaaacaattaatacatagacacctttcatttaagtatccaaacaagtaatcatataaacaagacacatatcccaccatatagatagggaccacgctttcaaaaaatgaaagagcagcccctccccaatgactatcctttgtttataaacaaagattcaaacttatctgaccaaatccttgggataaacaggaggcattttcacccgtttccaagtttcataataccaagaattgatttcatttccatccttatccgttttcacaaaaaacttcagtaccatgacatcgccccccttcatctcaaattccaaaatattatccacacctaccaattgtggaagatgcagatttttctccacatgctctgtataagcattaggagcagtctgccgataggtaccggaaccaataataatagctccatgattaggaatcatggtcatattggtaaacttgccgtcatcagacaaaattttaaaagaattacttggtttcaactcacccggcacctgaggagtacctgatacataaaagcacatctgccaaatccctttcaagttgacaggggctgcatctgatttttcctgtcccactacacgcgaagtaccgattagcaagaatgctatcatcagtaggaataattttttccgtttcatagctgtatatatttagttaacaaattgcgttatgtggatacaacaaaattagaaaaatttttcaaactttctgcttttcaaataacttttttacagttaaacacaaaaaaaatcctgctctatgttatagggcaggattttttgaattattatttcctacaattagaattcagcattgcgcggagtacgtgggaaaggtatcacatcacgaatattggtcataccggtaacaaacagcaacaaccgttcaaaaccaagtccaaaaccagaatgaggacatgaaccaaacttgcgggtatccagataccaccacatatccttcatcggaattcccagttcctgaatgcgggtcatcaatttgtcataatcagcctcacgttcagacccacctattatttcgccaatcttcgggaataatacatccattgcacgcaccgtctttccatcctcattctgcttcatatagaatgctttgatttctttcggatagtctgtcaggattacaggacgtttaaagtgctcttccaccaaataacgttcatgttcagaggctaagtctactccccaatataccgggaattcaaatttatgaccttttactacagcttcctccagtatcttgataccttccgtataaggcagacggacaaattcttccttcagcacgccctgcaaacgttctatcaatcctttatcgaacatatcgttcaagaacttcacatcatcatagcagttgtcaagcgcccactgtacacaatatttaataaagtcttcggccaaatccatattatcagtaatatcattgaacgcaacctcaggttcaatcatccaaaactcggccaagtgacgcggcgtattggagttctccgcacggaatgtaggtccaaatgtataaatagcccccaaagcagtagcagccaattcaccttccaactgtccggaaaccgtcaaactggcttgtttgccaaagaaatcatcatcataaataatcgctccgttttcatctttcttcaaatcataaagattcttggtagtaacctggaacatctgtcccgcaccttcacaatcggatgctgtgataataggtgtatgaaaatagaagaaaccacgttcatggaagaacttatggatagcgatagccatgttgtggcggatgcggaatacagctccaaatgtattggtacggggacgcaaatgagcgatctcacgaagaaactccatcgtatgacctttcttctgtaacggataagtattatcacaagtacctaatacttcgattccacgcgcttgaacttcggcagcctgaccagagccaatggattcggtcaactcaccgttcacactgatacatgcaccggtggtgatctgcttcaacatttcttcgtcaaagtttgccaaatcaacaacaatctgcacattatttattgtagaaccgtcattcagggcgataaaatttacctgtttgctaccgcggcgggtacgaacccaaccttttacattgaccatcgcaccaaaatcacggcgcttcagcaagtcaacaatctttgttctactaattttttccattgttttgtctctttattgtttattattcaaatgagcccatgcggagcatgttcacttcttgttccgtcaggtaacgccagtcaccgcgacgcaaaccttttttagtcaggccagcaaaataaacgcggtccagcttgattaccttatatcccaaggattcaaaaatacgacgcacaatacggttctttccggaatggatttcaataccgacttgtgatttgtctgtttccgatgcatagctgatggcatctgcatggatctctccatcatccaatgtcacacctgctgcaatctggtcaagatctgccttggttacattcttatcacaatatacatgataaatcttcttcttcaaatacttaggatgagtcagcttggaagccaaatcaccatcgttagttaacagtaatacaccggtagtattacgatccaaacgcccaactggataaatacgctccttacaagcacctttcacaaaatccattacagtcttacgttcctgaggatcatcagaagtagtcacacaatccttcggtttattcaacaaaatataagttttacgttcaatacttaccggttcgtcatggaacttcacttcgtcagtacgcttgatcttagtacctaattcggttaccacttcaccatttacactgactacacctgctgtaataaactcatcagcctcacgacgggaacatatacctgcattagccaagaacttgttcagacgaatcggctcatttggatcggtcaatatatctttatattcaatctgtttcttcagactatactttgcattcgggttataatcagccgtacgggggcgatagggacgattgtatccaccaccttgataaccaccggtacgaggacgataaggacggtcgccgccttgattataaccgccggtacgaggacgcggagtgtaagaacgctgttcaccaccttcaccgctgttaaaacggggacgcggagtatatggacgctgctcaccaccttcgcgattatatcctccggtgcggggacgcggagtataaggacgctgctcaccaccttcgcgattatagtttgtacggggacggtattgacgttcaccaccttcctcaccattattgaaacgagggcgcggagtatatggacgctgctcaccaccttcacgattataatttgtacgaggacggtatgaacgttgttctcctccatcctcactgttaggattaaagcggggacgttgcggacggtcaccattattattatagcgattataggaaggacggtcaccgttgttataagaagaacggtaaggacggtcgccaccttcgcgattatagctgttcgtacgaggacggtaaggacgctgttcgccgtcgttgttgtatctgttgtaattactgtctctgttataagacttataaccaccatcacggcttacattctggttttcttcgtttgcagcaccttcttgtctgctttcattttctgtactcatggttttccttttgtttattaattaatgtataacgccctctcgggcttttttgattaaaatccaactaactattttttaaatacctgtataattatgcggtgtaatcactcgcagttcctttttaatatcttcgcttacatttagtgtttctatgaattctttaatagccccttctgtgatagcttggtttgtacgggtcaaagctttcaatgcctcatacggatgaggataggcttcgcggcgcaaaatagtctggatagcttccgccaccacactccaacaattatccaagtcggcatagattgctttctcattcagcaacagtttacgcagacctttcaacgaactttggatagcaatcacaatgtgaccgaaaggtacaccgacgttacgcaacacagtagagtctgtcaagtcacgttgcaagcgggaaacaggcaacttagaagaaagatgctccagaatagcatttgccatccccaggttaccctctgcattttcgaagtcgatggggtttactttgtgcggcatagcgctggaaccgacttcgcccgctttaatcttctgtttgaagtactccatagagatgtactgccaaaagtcgcggttcatgtcaatcataatggtattgatgcgcttcatggcatcaaagatggctcccagattatcataattagaaatctgagtagtatattcctcacgttccaaccccagcttctctgccacgaactgatttccgaatgctttccagtcatattcgggataagctacatgatgtgcattgtaattacccgtcgcaccaccgaatttagccgtgacaggacaagctttcaatacagccagctgacgattcagacgataaacgaaaaccatgatttctttacccaggcgagtaggagaagcaggctgcccatgtgtttttgccaacatagggatatttgcccattcttcagcgtatgtagtcaactgagcaatcagctcttcaatttgcggatagtacacttgttccaatgcctcctttatagacaaaggtacagaagtattgtttatgtcctgtgatgtcaatccgaaatgaatgaattccttgtattcctccattccgcccaacttatcgaattcttctttgatgaaatattctacagcctttacatcgtggtttgttacactttctatctctttaatacgctgtgcatcagcttctgaaaaattcttataaatagcgcgcaatgcatcaaaacgtgcatgatcaaagcttttcagctgtggcaacggtagttcacacagagtgataaagtattcaatttctacctgcacacggtacttgatgagtgcaaattcagaaaaataagaggccaaagctcccgcttttcctctgtatcgaccgtcaataggtgatattgccgtgagtaaatcgagctccatattatattctttgataattatcagactgcaaaattaattctttttcttgagtttaacggcctgaagatgcataaagtttgcgaaaatgaagatttatttcacaaatccctttttagtccatttcagactgttccaacgctgtacaaagataataccacgaagattttcatccagcacaaacgcacaccacatacctaccaatccccatccccaatgaatgccgaacaagaaaccacaacctacggcaacactccactgaacaacaaatcctacataaaacggataatttacatcacccgttgcacgtaaagcattcgtcgcataaatattaatagcccgtcccacttccaaaatcacatcaataaacaggataatagtacccagacggataatttccggattatctgtcaaccagctaaacaaggtatgccccatcaaagcccagatacaggataaaaccaaagaaaccaaaatagaaatacgcatcacatatttgcctaacagataggctgcatgaattttcctttcacctaccagatgtccgatacagatggctccgccttgtgccatggcaatagcaaacaaataaacgaacatcactatattcaccacataggtacgggtagccagcgcttcattccccaacatattaataaaataggtcaatactacctgagagaaactgtaggacatattttctccggccgaggggactccgattttcaacaggtttttcagctcgacaaacgggaaggggcaaaaataggataacggaaatctgggaatatgcttgcggaaaagaattacaaaaagtatcaccatagatacccctcgggcaaatgctgtagagatagccgcaccttccactcccaaagccggcatgccgaacttaccgaaaatcagcgaatagttaccgatgatattcagaatattcacaactaccgttaccatcatgggataaaccgctttgttagcactacgcaaagaggcagaaatagtcagagatatggcttgaaaaaaagcgaatgcccctactatcttcatgtaactcactccatattccatcagttcgggacgaagtcccatcatagatagcagagaagtggctccgtaatgcagaatagcactgacaaacaggccgaacaccaaattgagtatcaatgatactcccaccacctgcaccatattcttgtgcattcttgctcccaaatattgcgaacagagtacggaagttcctatattaatcacctcgaatatcaggaaagcaaacatgatgagctggttgaccaccccgacggcagccacactattgtctgaatactgactcagcatcacggtatctaccgcgcccagcatcataatcagcaatgtttcaatgaaaataggaaccgccagtctggcaaggttctttcgtacacttctcggttcttgaattacgtccacttgttacccttgattttcggggtgcaaaggtacagacttttcacgatgtaacggtttgatttatatcaagaaatacgaacttaagatttttacaaggagataaacaggaatctgatcttttctttttatctttagaaccgaatcttaaatcaacatattaacatgaaaaaaggactcctcttgttatctgcaattcttgcattgggctccctgtcttcatccgcccaaagaagaacggctaccatgactgatgaagaaatgtaccttgatgccatgcatcgtaacatcactaccgaaaagattttcggttatgtaaagcaactttcagacccggccttggagggacgactcgcaggttcgcccggaatggctaaagctgtagatatcgtaaaaggatattttaaagagtggaaactaatacctcgtggtgagaatggttcctacatacagctattcccccacccttgtgtagagatacaaccgggaagcactatggatatcctatttcctgtcacccaagacaagaaaaaaactgtatggatctccaagacatacccttgggcagatggttggtttgccggaggaatgaccagtaacggagaagtgacagccgatgtggtatatgccggatttggcgttacagcacccgaattaggatatgatgattacaaagacatagatgtaaaaggcaagattgtgctggtagagggagaaacacccaatataagccgtaaccccgattcactggccatgtggtacaaacatactttgcaccaaaccaagctgaacaacgctgcagcccatggtgcggcaggcttgttatacaaatgggttcccggtccgaatgccccctataatccgggatttgtctattgtcatgttacagacactgtggtcaatgatattttcaggggaacaggcaagacctataaagaaaccatccggcagatttataagactcagaagcctgcctctttccataccggaaagagagcccacatcaaaatgaatgctacctataatcccaatgctactggaaaaaatattttgggcatgatcaaaggcagtgatcctatactatgcaatgaatatgtaatcatttccgcccatctggaccacttaggaatgattcctttcctaattgaaggagcgaatgacaacaattcttcctccgctgccatgctgggagtagccgaagcactggcaaaatcaaagataaaaccgaaacgcagcatcatctttatgagtgtggacggcgaggaggccggactcaccggaagtacctactacaccaaccattcccttgtgccccaaaacaaagtggtagcaatcctgaatctggaacaagtgggtgtaggtgagatgctaggagcgaattatcactataaataccccgaactggctgagctatcagagaaagccaatgataggtatgtacatcgacgtctgttcactagtgagactcatttcctgacccgccctcgcacagacggtgcagtctttatgaaagccggctatccatgtatagacttatgggccttgggaggcggttattaccatcatcccaaagataacacccaatctatcaatcccgatatcctccgagctgcaaccgaatggttatactggactacaatttttatagcagacaagtaaccggatataagaaatcccggcgagtcatcgctctgccgggatttctttatctaaccgatgttgtgtatgtgttgtcgtagatgtgcttggtgttgtgtcattgttgagtcagatattccttatacattttttctatctccttcatgggaatatccaatgtcttcacttgtctgaaaaactcaggcaggtcttcatgcaggaatgtatttttccgtaaagcaataatccggtctttagcccctgccgatacaaaataaccaatgccgcgtttattgtgaatgatctcttgtccctgaaggtaatcatacgtgcggaccaccgtatttgcattcacctccactgtggcggcgtattctctgaccgatggaatacgctcttcttccgtatattgtccttgcaggatttcatcacatatccggtcagctatctgcaagtaaatggatttactttctttaaatttcatagcaaacggaatttgggtttaataacttgtgaacgggtaaagagccggtaactcagccaccagttgaacatggtgaatgcactgaagaacgccacccctaaggaaagtaacttgtttaatgtcacccactggaaattagcttccagccattcggcgaaactacgcataccgtcattgcctacccatgatatgatatgtactgacaagaccgaacacagaatagaaataagcatcaatgtacccaatgtcttgaaaaaaggtttcttgtaccaataactcccccctagaatataaagtgaatgtgaccacaccaagaaagcccatccgcacagctcacccagccagttctggtaggacatattcaaagcggatcccgatcccctaaatacctgttctccatctatagcagccatagaaagaagatggtacaacactgattgatggaatgcctcgggcaaattaaacaaaggaagtacaagataacgcgtaatctctgccaatgaagcggcaactataatggctgcggccatccctaccgtaacaattaaaaatcgtgctacaaatttctctatcatagtcgccggaagcatcagaaaagcgatacgtttttcttttgtaatcatgttttccataatgttggcagcataagcaatactggcaataccaatgataaaaacaaaggtccccattatattagaacaataagtagtaaacgatatctgagaagacctaccagaactcattgtccacatatgaagtatcattaccaaggcgaatgcagcataaattcctatcaaacgataaagattcgttttccaattttccataatctcgcgtttcattaccattgcaatacgcgaaaagctaaagaagttattcgtatccataatgtttgtgtgtgttacttgttaaacatggtttgcattttttctctctctgccagcatagcgttgaataatacttccagattcaaattcgtttcctcattctcagtgttcgggaagatgacactgtttccctggacggacggctggacatagagtgctgtgtccgtcggttcattcatgccttgctctgcaaaatagactttgtcacagatggtctttaccgatgcattcaacaatacgcgggtaccgtcaataataaccacatgatccagcaggctgtcaatatctctcacctggtgcgtagagatgatgactgatttttcatcggtcatgcccgaagcgattactttacgaaactgacttttagaaggaatatccaatccgttgctgggctcgtccattaccaacaaagaggtattggtagctaatgcaaagcacataaatgctttcttcttctgtcccatcgaaagctcgcccaaatgaatatcttcattcatatcaaaatcacgaaggcaagtgctcaagagttcattgctgaaattcggataaaacggagtattcagcttcaagtattgtttcaaactgactgatggcaaagcaaattcttcaggcactagaaacatgtcctgcaaagtcaggggatagcgcatggaaacatccacccctttgtaaagcacccgtccggcctgaggacgaagcaaacctgtcattaaataaagcaaagtagatttacctgtaccgttcttccctaaaaggccgtaaactgaacctttgtccaatgctagcgagaagtcatcaaagactttctgttttctctttccataactgaaagacaagttctttacttcaatcatcattgtgtttatggttttattagttatttagtgtattagttgattagtacactgtaaatgtatatagtttatttgaataaacaagaagaatgactcatctttaatattcattaaccgttaaacgaattaagcgggcggcaaccaagtactgtccgctcaactcaaatgataaatgaaaaaaagaaggactatttaattcctcctagtgctttagtagcagtttcgtttccaggatcaatttccaatatcttattccaatacagttttgactggttataatcttcttttacaaaataataatatcccaaatagctgttacattccaccaacactgatttagtagcatcaggcttctgttccagaatactcagtgcagcctcataataaggctttgccaatccctgagttgtttcaggatcacgcaaagaattaacacgggcacgccagaagtttcctaaatagttatcgggaactttagcagccacttgtgcaaaaatagtatcggcttcagctagataaagtggttgcttatcctgataagcagaatcagtagccgcataatagttcaaacgtccatataaaaacaggtcactaatatccggatcacctttcattccgcccaaataatttttataagcctctatggccttcggaaaatcacgttccttttcgtatacatcagagatatctttatagatttccgtatgcgatttgtccatagccagtgctttgtcgaactgtgccaccgcttcatcatactgcttgtcagcttccagcaaacgggcgaaataaacgtaatccaaatatacataatccggattaccgggattagaaaagaaagtggcggctgcttccagtccttctttgtaatcctttaactccagattatcatacatcgccagacgtttcagcacatgattttccggagcaagttccagacctttctttaccatatccgaagactgcgcataatccttattcagatatagcaacatggcatagcgggtatagtcctgttcggtaggcgtacctactttcagataactttcataagcttcttttgctttgccatactgccccatcgtataatatacatcggccaattccttactgatacggttatcgtccggagccttagtctgcaaacgcatcaacatatccagtgacagttgagggtctacacctttatatacctgtgcatatttaaaataagcttcgctgcaattttcatccagataaatagcctggttataatcactgctggctttgttcacatcatttagtttcaatgccacatcaccactcagcagataggctacagcacatttactgttcacatctttagcgcgctgtgcatattcggcagcttctgctgtttttccctggtccagataagcccggcctatctctaccaacaaggaagtattcttcttatttttacctttcatcagttcatcaaaagcctcggaggcttttgccggattctcctttatcatcgtggcagcctgtttcacttggggtgaccattcgctgcctgctggtgtctgtccccacatagttacggccaggcacaggctcatcacggttaatactaattttttcatggttcttcttttttgttcatttattattcctcttttacatctacaatcctcacagcagccgtagcaggtaccagtcctgatttcaagatgatacgctgtccccggaaatctgtcaggaaagaagtcagaccactgggcagaccacttttaggatcattgagtaaaatgtacacattgcgagtgagcggatactggttcaaagccagataagcttgataaggcttgaaactatttcccactgtagccgaatccgcacggctgacagccattatccgaatgacgtcattgaaagagagtcgcgtactatccgcaggatttcctatccagttgacaccgataacccctaaagctgcgggattcttagccacatacgaaatcacctccggatttgttttctgcgccttcaggtccttcgacaaaggcataccgccgcagatcgaatcaagtacataatgtacggtgctcgaattgggattatcaaataccagttggagctcacccaaacgggaagcaggattcaactgtttccagtcagtaactttccccgtcagtatttctttaaactggtcaaccgtaattaatgaatccgtattttgcttgttcactatcaaggccaaaccatctgtcgccatctttaccgatacaggaaagaatttcttgtcattaagataggctgtttcctgcctggtgagttgccgggtggttatagccagacgtacactatccgccagcaaaagtttcatggcttccacttcgctgcaataaatgggatgcacggtggcatccggtgtcaatgcataaaacacctgtaactcctcttctataatgggacggaaagtttcgtccaccgctatcgttatagtgccagaggtcaacgtatcgtcttcccccggtttgggtttgttgccgcagcccgaaagcagcagcaacgaagcagccaataatgcaatatacagcttcatcatcatatatagatattattgtagcttaaaagttataggaacggtatagtacacgggaacattacgtccgttctgtcttcccggaatccacttcggcaatgactggatcaccctgatggcttccttgtcgcaatacgggtccagagaacgcatcaccttcacatcctttacgtcacctgtagccgaaaccacaaagcggacaaacactttaccctgtattcctttttcctgcgcaatggtaggataatgcaaattctttgctataaaagacagcaattctctatcaccacccgggaactgaggcatctgttctaccatagtatatgttttttcttctgcttcgggggctttggttatcacttctttcagttcagcaatatctttaccgttcaactcatcattacctttcacatcggcaatagagatagccactttggtctgagtcaattcttcctgactctttatctcttcatcatcacgcacttcttcatcttttttgatgacaggagctgtaaatttgatagagcttttcagagcaggaggcggagccaccggttccactttcttgaactcttcctgtttcacttcgggttcttccagttgtgacaaggtagtcacctctgtcatcacctctttctgcttcggggttgccagttttaccaatgtcggtatactgaaacctatggcagcaatgatcactacaattaccattgcccacgtgtggcgtttaggtgaattggcacgcatcttataggcaccgtatgccttgttcttaccttggaatatcagttcacaccattcaggtgaggtcaaatctatttttgccattttcttttcctccttttaaatgtgtgttactattccgcaatgtctttactcagatcgcccttcgtatcatagttcttgatcaagaactgatctgcatctgcgatgtctgtaattacatacttacctatattgcatatttgcatttcatctagagcatcaatcagattcttgtatgaagagtcatccgttgctttaataataacagtcggggtatcctttccgctttttatttcagccagttttttcgtatactcctcctctgatatctttagatcagctttctgttttttcagatcgtttacttcacgaactgccgccgagttctttttaagaagaatggaacgcagaccatctgcattataggaagtttccttcagcgatgtatagtctttataattaggttctccttcataataatacaatttatctcctccggccagtaacagggtaattgcttgtgaagccttcaccttgctctgctgctcttcagtgatgttcttgtcattgctcggcatacttatttccatcgtctgaggtttgctcagcgtggtacacagcataaagaaagtaatcagcaacatgttcatatccaccataggcgtaaagtctacgcggacagtcatctttttttgcttcgaaccctttccttttttgctgctttcttgtacttcagcactcataattattcggttttatttatcagaagtagtcttcagagaagtaatcagattgtaccggttctctctgaggtcctgaagtgagttcattacgtttttaatcacagcgtagggagttgacgcatcagctttgatagcaatacgtaaatcaggattcacctgacgagcactgcgtacccatgatttaaactgattatctgtactgtcacaggggataccttcatttttcaacagtttatcctgctggtcggaaggcagatccagatatttctgcatgcttctcatcgggacaccaaatgtagaagctgtcacaaatttcttctcctgctcaggagtaaaatcaactccgtactcctcacccattttctccaatacggccttcatgtcgggctgtttgtcgaggctcataaatattttcccttgcgggtccaccagaatctgaaggatattcgtttccggaatcttgatttcagaaacggaggctggagtaaacacctgtaccggctccttctttacgaatgttgaagtcaacataaagaaagtaagcagcaacacagtgacgtcactcatggccgtcatatctatgaacgtacttttctttttaatctttgctctacccatagcagtttattttaaagggttggcacgattatttatgagaagccgcaaaggtctgtacaatagagaaacctacttcatcgaggctgtaagtcaatttatcaatcttattagtgtagtagttataagaaataaccgccaatgcacctgtcaagataccgaatgccgtattgatcaacgcctcggaaataccttgtgacaaagccatggagtccgtaccaccaccggcagacaaagctgcaaatgaacggatcataccaattaccgtaccgagtagtcccatcaaggtacccaatgtggtgattgtaccgataacaggcagattctgctccatcatagggagctccagtgcagttgcttcttccaattctttttgaatggccagtactttctggtccttggaaagtgtcgcatcgttttccacgtcggcatactttcttaaagtcgaagtaactacattggctacagaaccgccttgtttatcacatagctcttgtgccttcttcatatcaccagcggccagggtagatttaatattagcgacgaatttcaccagcgaacctctgccaaaagcagaccggatggctaaataacgctcaacgctcaacgctatgacggtgagcaacagggtctggataatgggcaccactacaccacctttgtaaattgttcccaggaaactgcccggcaacggatggttattagggtcattattcataaagttagatggattccccaatatgaagtgatagatacaaactgcaatgataaagcagcatataattacccaacccgcatttttaatacctacaatcttattagtagttttattttgaatagtttccatgatatatgttttaattaatcgttatagttaaatgacaattctataccaaccccgacactctgcagggcgccggagaaggtgaaacaactaaatttataacgattaattaaatcaaaatgcgtctcagcgtgaacacgaaataatgacatgccggagacacacaatgaatgggattagacggaaagatcttagcgcggtcagttgccagtatttcttcccgtagtgaaaaacgacctatgagaatttttaagaagttctgttgaagttcctctgctctgcggatacggagatcgtcgggcattagtttcgctaatacctgctgttgccctgtgagtaaagagtgggtgaaagacatggtatccaatgtaccatgatcagatgccatattatcttgatgttctgtagtagtagcatatctgtcaatagcggaagaaacaacatctgcatcgactccctgataattaaacattaaaagcaggactattaatcctattttgacgataagcttcattttggctactagtttcgaaagattctcggtttatattattgaaacaattctattgtttttttgttcacgcagacctaaaaattattcaagttcaagtggtaaatatattcgataatcataaagaaattatgaaatacaatctttttaaccccttttctaattctaaataaaaacctgccccttccggacagttccgtgggaaaggtacccacacccacggggaaaaaacggtagaggccacatttcatgcgtgcggatacaaaaaaagcctccggaacttcttcaagtccgaaggcttcaatcaaaacggcggctacctactctcccactgtgacgcagtaccatcggcgtgacaaggcttaacttctctgttcggaatgggaagaggtggaacccttgtgctatagccacctgaataaggttgacatattgttgagctgttatcgtaatttcattctgtagtaaaaaccaaaggtatacaccatccgacatataaggaaagtggacgggcaattagtaatgctcggctttgatgtctccatctttacacctgcatcctatcaacgtcgtagtctacaacgaccctgagaaatctaatcttgtggccggcttcgtacttagatgctttcagcacttatccgatccagacttagatacccggcaatgcacctggcggcacaaccggcaaaccagaggtctgtccaacacggtcctctcgtactagtgtcagagccacgcaaatttcatgcgcccacgatagatagagaccgaactgtctcacgacgttctgaacccagctcgcgtgccactttaatgggcgaacagcccaacccttgggaccttctccagccccaggatgtgacgagccgacatcgaggtgccaaaccactccgtcgatatgagctcttgggagggatcagcctgttatccccggagtaccttttatcctttgagcgatgtcccttccatacggaaacaccggatcactatgctctagtttcctacctgatcgacttgtcagtctcccagtcaagcgcccttatgccattacactctaaggccggttaccaatcggccggagggcacctttagaagcctccgttacgcttttggaggcgaccaccccagtcaaactacccaccaatcaatgtccccgttccacgggttagaatccaaacaaataaagggtcgtatttcaacagcggctccacaaatactggcgtacctgcttcaaagcctccgacctatcctacacatcacgtgcccagattcaatgataagctatagtaaaggttcacggggtcttttcgtcccatcgcgggtaatcggcatcttcaccgatactacaatttcactgagctcacggttgagacagcgtccagatcattacaccattcgtgcaggtcggaacttacccgacaaggaatttcgctaccttaggaccgttatagttacggccgccgtttactggggcttcaattcaacgcttctcttatcgatgacatctcctcttaaccttccagcaccgggcaggtgtcaggctgtatactggatctttcgatttggcacagccctgtgtttttgttaaacagttgcctggaccgattctctgcgccctcccataaaagggtagggaccctttatcccgaagttacagggtcagtttgcctagttccttaaccgtgaatcactcaagcgccttagaatattcatcccgactacgtgtgtccgtttgcggtacgggtacctgcaggattaagtttagcggattttctcggcagcatgcttacgcgcactattgccttgtcccgaaggacgcggcatactgtcaggttcggatctcatggtggatttgcctgccatgatcgactcctacacccttcaaccatctattccgtcagatggcggcactgtcactactgcgtctccacgtcactcctgaaggtagtaacggaatattaaccgtttctgccatcggcatcgccgttcggctgagccttaggacccgactgaccctgatccgattagcgttgatcaggaaaccttagtctttcggcgagggggtttcccgccccctttatcgttacttatacctacatttgcttttccagacgctccagaatacctcacggtacgccttcgacgctgactggaatgctcccctaccgatcatatcaatgatcccactgcttcggtagacaacttaatacccgattattatccacgcccgactcctcgactagtgagctgttacgcactctttaaatgaatggctgcttccaagccaacatcctagctgtcttagcagtcagacttcgttagtttaacttagctgtcatttcgggaccttagcaggtggtccggattcttctcctctcgggcacggaccttagcacccatgccctcactcctgcggtagaactgatgcgcattcggagtttgtcaagacttgataggcggtgaagccctcgcatcttatcagtcgctctacctcacatcagtaacccgcaaggctgcacctaaatgcatttcggggagtacgagctatctccaagtttgattagcctttcacccctaccctcagctcatccagaagcttttcaacgcttattggtgcggtcctccagctggtgttacccagccttcaacctggccaagggtagatcacttggtttcgcgtctgccactgccgactatacgccctgttcagactcgctttcgcttcggatacgtgtgtcgtcacacttaaccttgccggcaaaggcaactcgtaggttcattatgcaaaaggcacgccgtcactcattaacgagctccgaccgcttgtaggcgcacggtttcaggaactatttcactcttctgttcgaagtgcttttcacctttccctcacggtactggttcgctatcggtctctcgggagtatttagccttaccggatggtcccggcagattcacgcagaattcctcgtgctccgcgctactcaggatactactatgcttcgacaacattcgaatacgcaactgtcatgctctatggtctttctttccagaaagttcttctctgatgtcttcatgcaacggcgtagtcctacaaccccacccatgccgtaacatggatggtttgggctgttccccgttcgctcgccactactgggggaatcattgtttattttcttttcctgcaggtactaagatgtttcagttccctgcgttagcctcttacatagtaagataatacctcttcaagatattgggttgtcccattcggaaatctctggatcaaaggtcatttgcacctccccaaagcttatcgcagcttatcacgtccttcatcgcctccgagagccaaggcatccgccatgcgcccttctttactttccttatccattcgcccacacttgcgtgccggcgggatgatatatactttcagctctttactactaaaattactgtttgcttgtacaatatgtcatagatcgttcatcttcgtttcttacgtttccgatggagtggagaataacggattcgaaccgttgaccctctgcgtgcaaggcagatgctctagccagctgagctaatcccccgaacttgattccgttcgtagtcccaggcagagttgaactgccgacctctacattatcagtgtagcgctctaaccaactgagctataggactaagttcaacctagtctgtttaattagacccggcttcttactttctctcttccgtatcattacggaatcatatcttgaataaacaacaccagcagtacaagaacaaaaaccttatcgatctttcgtcctctccagaaaggaggtgttccagccgcaccttccggtacggctaccttgttacgacttagccccagtcaccagttttaccctagggcgctcctcgcggttacgcacttcaggtacccccggctcccatggcttgacgggcggtgtgtacaaggcccgggaacgtattcaccgcgccgtggctgatgcgcgattactagcgaatccagcttcgtggagtcgggttgcagactccagtccgaactgagagaggttttggggattggcatccactcgcgtggtagcggccctctgtaccccccattgtaacacgtgtgtagccccggacgtaagggccgtgctgatttgacgtcatccccaccttcctcacatcttacgatggcagtcttgtcagagtcctcagcggaacctgttagtaactgacaacaagggttgcgctcgttatggcacttaagccgacacctcacggcacgagctgacgacaaccatgcagcaccttcacagatgccttgcggcttacggctttcaccgtaattcatctgcaatttaagcccgggtaaggttcctcgcgtatcatcgaattaaaccacatgttcctccgcttgtgcgggcccccgtcaattcctttgagtttcaccgttgccggcgtactccccaggtggaatacttaacgctttcgcttggccgcttgcagtatatcgcaaacagcgagtattcatcgtttaccgtgtggactaccagggtatctaatcctgtttgatacccacactttcgagcctcaatgtcagttgcagcttagcaggctgccttcgcaatcggagttcttcgtgatatctaagcatttcaccgctacaccacgaattccgcctgcctcaactgcactcaagatatccagtatcaactgcaattttacggttgagccgcaaactttcacaactgacttaaacatccatctacgctccctttaaacccaataaatccggataacgctcggatcctccgtattaccgcggctgctggcacggagttagccgatccttattcataaagtacatgcaaacgggtatccatacccgactttattcctttataaaagaagtttacaacccatagggcagtcatccttcacgctacttggctggttcaggctctcgcccattgaccaatattcctcactgctgcctcccgtaggagtttggaccgtgtctcagttccaatgtgggggaccttcctctcagaacccctatccatcgaagactaggtgggccgttaccccgcctactatctaatggaacgcatccccatcgtctaccggaatacctttaatcatgtgaacatgcggactcatgatgccatcttgtattaatcttcctttcagaaggctgtccaagagtagacggcaggttggatacgtgttactcacccgtgcgccggtcgccatcggccttagcaagctaagaccatgctgcccctcgacttgcatgtgttaagcctgtagctagcgttcatcctgagccaggatcaaactcttcattgtaataatatctttttccaactgttcagttgataatctgctcaaggattccaaatctatcaatatcaatattgacggttcttgttttttccgtacaccatatatatattacatatagtgcaccggcttgtactacttgtttgtttatcttaaatctttcaaagaactctcatttatattttgccatcgtttccgaaagcggatgcaaaggtaagagattttatcgtaaccgccaaatgttttcgaaagttttttttgaaaaagtttttttttcgaaacttccataaaaggcgggacgtccatcctccccacgtcttatccgttctcgctcccttagccccgctaaggtaagatactgggtgcagacactgtcaaggaaaactctcctacgtttgtttcaccaagtcagtcacacactgtctgaagtgccgcatctctctcgattgcggatgcaaaggtagaccttttaacgataaccagcaaacatacgaaggaaaaattatacggattttctgaattttttttgtaatactctgaataacagatgtgttacaaagcatgtttttatagcggaggacacgggaggaaaaagacacacacattataatattcgcacgcgcgtatagggacggaaaaaggaaggaacctatacgaaaacagcagacggaaaacaaggaaagacggaaaagaagcaagcccgaagaaaaaccggacaggttacgaaacacaaaccacagagctctcaaaagtgctgactccgcaaacactggggaaaaactgtaggagaaaaatgccgagaagaaaaaaaatcattttcttacatctcgacggttgttcggaaacaccatcaacttcaagaaccaatacttacacccagacaaaagcaaaaaacatctactttatccatcaagctacacatattccaatccacaaataaaagacaacctgttctatttaaagaagaaaagttttcagtagatttgcactatataaagatatacaatgaagaaaataattatcgccatcgattcattcaaaggctgtctaacttcagcagaagcaggaaaagctgccgaaaaaggtatcaaaagcataaatccttcctgccacacttcagttattcccatcgctgatggcggtgaaggtttactggacgtactcatcacagccactaaagggaaatatataaccttatcggcacatggaccgctaatgaaaatggcaaaaacacattacggtctgtccggcaatggcagaacagctattatagaaatggctgccatcagcggactacctctcgtacctattgaacaaagaaatcctatgctgacaacaacctttggtacaggagaattgataaaagacgcattaaacaaaggatgcagaaattttataatcggtattggcggaagcgcgactaatgacgcaggattaggaatgctacaggcactaggtttccgctttctagacaaatcagggcataccttaggtacaggaggccaaataatggaagccgtggcaaacatagacacatccggtattcatcccgcactaagagaaacacacttcatggtagcatgtgatgtagccaaccctttctacggccctgacggagcggcatatatctttgcacaacaaaaaggagccgattcaaatatggtgcaaagactggatgaaggcatgcaatcattagccgaagttataaagaaaacgacaggaaaagatatcacgaactaccccggtgcaggtgcagccggaggcatgggtggtggactactggctttttttaacgcagagctaaaaccgggaacagaattattattgaaagccatcgacttctccgaaaaaataaaaggagcagacctcattattacgggcgagggaaaagcagaccggcagacagctatgggaaaagtaccatacggaatactaaaggaagcacaaaaagaacatattcccgttattgtactggcaggcagtatagaaaacctgccggaattaaacaaagcgggattcaaaggtatattctctatagcccccggccccatcaccctggagaaggcaatggaaccggagtttgctaaagaaaatatcacccggctggtttcccaactctattcagttataactagcttcggctaatttgcaagcctttgtcggacaaagccatatcaacgaaacgggcacaactgttgggtgggttctgagtaagaatacttcgaatacgtatagcagcctcaggatctttagccaccatataaagatagccgcctccccccgcacctggcaatttatatcccaggcaataatcatcaatccggcgaatgatagtctcaactgcctcgggattagtgccgggatccaacgcttggttcagcttccagcttttaccaaccaaacgccccatttcatcgaaattcccacgctgaatggcttcgtacaagtcaagagcatgccccttcataccgccaagtatagacaaatgctctgtggagttgaggaacatgctacgcacgatttcagctaaaattcctttggctgtacgggtaattcccgtgtaataaagcaaatggcacttctgatattcgccacctgtaaacaaataatcgggcaaccagcgcactaacggactctgatccatacctgcatgagtctgcaataatttcactccacgaagcacacctccgtattgatcttgccacccccctccggtagtcagtaactgttccaaaataagcgtacggttacatatctcgttcttatcccagttcagtccgcaaaaatcagagattgcccccagcacagttgatgcaagaatagaacttgtacccagaccggagcccgcaggaatcgcagaaagcagagtgatttccattccggagccaaacgccttcaactgctcttccaatgaaacatacgattcggtggaaaagcccggctggaaacctgccagcaccaatgccgctttaggtatagagaatggggatcccacttgcatgaaatcccttacctccccgtaagttgtaaccacttccatagcgcctaagtctatagaacgaagaattatcttatactcccgacagggtttcacgtaaacttgtagaggaggctgcccgttcaactcaatagcaatattcaccacattccccccttcattcaagcaataaggtggagtatccgtccatccgccggccagatcaatacggaccggactacgcccccagacaatctgatcggagtacactgacaaatgcggttgctgcctcttggctaaagccgaagcagtaagtccgtcgcgcatcaaacgaaaagcctcattctcatattcccgataagccagccccttaagctgctgcacccgggcacggaacatattatcactgatacgtgtcatcagcggagccgattctgataaaggctcaggcaacgacagatcataccgagcaaattctccagcagcattctccaaatttagctgataaaagacacttcgttcataattatgcgccaatgccggccaattctttatccggaaagcttcacgctgttctgccagacgataaagattagaataagcagatatatcatcggcagataacttacgacagcgttgccatatttcttttccttgctgtaatgccggttcagagaccatccagcgcataactgctcccaattcctctacagatgagcaaaccggaaacaaacgcgcggcctgcaagtcgtgaccgttttctatttcttccaccgaaatgccgcgtacagcacaccactcacctacagacattccttgataatatgtttcttccttagccaaagctcccttgaaagtatcattgaagccgtatggacgcgctacatagccagattctccaaaaggaaccacatcaatacacacaccggacggaacctctaggttccaattattagcgggaacccctgttatgatggtctggtgatggatattccatcctgctcctacataactgttctctatccatatttccgaattttgtgaggtaagttgataacctacctcagcattttgaacaaacatggccggatgcggttttaccttcttgtgcataatctcccgctggtcgtttaccagattttgtactgccaatgtagaagaaataagttcacgactggttccgtaatgataaaactcccctccgggcaacggcagaatagccacactcagcttgttaagttcatcgtccatcatacgcgggtgctctcccaatgtaagtccgaaatcagaatacatgtcataataagagagttttccttccttataagatcgttttaccaacagactaaccgcacggtcacttaacagccaaattccgatatccatcagaaaaagatgggtttgcattaatttccccaattcctccaccgaaggtttttgaagcatgaaatcaagcttatcgggagtagcccgtgaagaaacaaaaacaccatggttttttgccagattaggatctacccataaaccgtaacacaccacatccgcatcaggaatagtctgaagcggttggcccgcacggatataaacatctccacttgcaatcaatgtatgaagagaagacggagctttctccatgatttgttcatataaagggagctggagggaaagcagattttgtgacagccgttgtcctctggcccaccggaatacaggaatgggagtaagaattttgccggatggcgcatatccgggcaaacgacgactctgcccgcctgcatgaagtaaaatacgtttttcttttcccagccaagtaagaaaatcgctgtcaggagctactttctgacaacaagcctccaacagccatgcagtccccccgcctgatcctagcttactacctataggatcggaagtacaaaaccactctgtctggtccgctttctctatatcatgaaaacattccaccagattagggggaagtgataataattttttcatagcacatctttgtttttattgcacacaaagatgcttattttcccctaataagccaaaagataagacatgaattttaatcagtaaattcaaaaacacgctcatccaatgacttcacttccttaaagcccggttgtgcaacaggcacaccgaatggcatctgcgctatcaatttccagtcatcagacaaattccaaactttacgtacttcatcatcaatcagcggattataatgctgcaaagacgcccccattcctgcatcttccagcatggtccagactgccaactgatgcatagcatcggtctgctctgcccagatagggaaattatctttataagtggggaaactttcctgcaaagagcgaacgatagccatatcttcaaaatagagaatagtaccatatccacaagcgaaacagccatcaatcttttcttcggtcttgccaaatacctcagccggaactcgcttacgcaagacattttttacaatgttccacaacttttcatgcgccttacctgttaataacacaacacgagtggtttgagaattgaaagctgaggggacaaattctacagcaaaacaaattaaatctcttatttctttatcagacaatgtcgatttgttttggatccgataaaatgtacgacgggctttcagagcctccttaaaactttttgtcatataaaacaacgtatttatgggttattataaatgaagaacaaacaggtaacaaaagaagttcactttttttgcttttttcaatgcaataacctatttttgttagctaattattaacattaaaaacaacacattcaatgaaagattttctaaaatttacgtttgccagcgtcatcggcgtcattctggcaggcgtagtgttcactatactagggattatcactctggttggcatagtcgcctcatcggatactgaaacggtggtgaaagacaactctatcttcgtactcgactttaaaggcagtttgtccgaacgtgtacaggaaaacccactccaacaacttttgggagaagaatttgaagcatacggtttggatgacattctagcttctatcaagaaggcaaaagacaatgacaaaatcaagggtatttatatccaaccttcttatctggaagcatcatacgcttccttagaggaaatacgcaatgcattactggatttcaaagaaagcggcaaattcatcgttgcttatgcagaccaatatgcacaggggatgtattatctttccagcgtggccgataaaataattatcaatccgcaaggaagtattggatggcacggagcaggcatgcaacctgttttcttcaaaaatctggtttccaaactaggactggaagtacaggtattcagagtgggcacttacaaatcagccgtggaaccgtttattgctacagaaatgagtccggccaaccgcgaacagatgaccgaatgtctggaatctgtctggcatcgtattcttgcagatgtatccgactcacgacgcatcccgacagatactctgaatgcttatgctgaccgatatatggatttttgtcaggcagaagaatatattcaatgcaaactggcagataccctgatgtataaagatgaggttatttcctatctgaaacaattaagcggtcgtgacgaaaacgacaaactaaacagtcttttcatagaagacatgataaacgtcaagaaaaatgtgcccaaagacaaaagtggaaatataatagccgtatattatgcatacggcgagatcctggatgctcccggcagttccacagaagattgtattgatgtacaaaagatgtgtaaagacctgcgcaaattacgtgataacgatgacgtaaaagctgttgtattacgcgtcaactcaccgggtggcagcgcatacggttcagatcaaatatggcgtgaagtagtaagactgaaagagaaaaaaccggtaatcgtttctatgggagattatgctgcatcaggaggctattacatttcctgcgctgcaaaccgcattttcgctgacccgactacgctgactggttctatcggcatattcggcatgatgtattcaggtgagaaactgtttactgaaactttaggactaaattttgatgtagtgaaaactaataaaatggctgatttgggtgccagcctaggtccggttctcacccgcccgctaaatgcatcagaacaagaattaatgcagaactatgtcaaccgaggatacaagctgttcgtaaaccgttgcgctgaaggtagaaaaatgtctacagaggctattgaaaaagttgctgaaggccgtgtatggaccggtgccatggcaaaagaccttggtctggtagacgagctgggaggtatagacaaagcattgaatgccgccgccacccaagccggtatcgaaaattacagtattatcggctatcctgaaaaagaaaatattttcgcaagcctgctgggaaatcagaaaaaacattatataaacagcgaaattaaagaatatttgggaagctattataacagcttcaaggcgctggagaacataaaagacgccaactgtatacaggcacgtatgccgtttgaccctaatatccaataaattgcacatggaaggtaatcttatcaagataaacaagtggctatatccggtttcatggatttatgggaccggtgtatggctgcgtaataaattgtttgactggggaatatacaaagaacgtaagtttgatatcccggtcatctcggtaggcaacatcaccgtaggcggaaccggaaagaccccccatacagaatacctgataagattattgcagaaagattacaaagtagccgtactaagccgcggctacaaacgcaaatccaaaggctttgtacttgccagaccggatacgtccgtacagatgataggtgacgaacctttccaaatgaaacagaagtttccggatatccatatggcagtagaccgggaccgttgtcatggcatagagcagttatgcaatagtcacatcgcccctggaacagaagtgattattttggatgatgctttccagcaccgatatgtaaagcccggaataaacatcttattagtagattaccaccgactgatttgcgaagacaccttgctgcctgccggacgaatgcgcgaacctgaaaacggaaaaagccgggcacatattgtcattgtcactaaatgtcctaaggacatcacccctatggatttaagagtcttaagcaagcaaatggaactttacccctatcagcagctctacttcacaacattaacatacggcaagctgcatccgttgtttacagcagggaatgcagtttcattaaaagagatagaaaaagacaagcatatcctattggtgacaggcatagcctccccagcaaaactcattcaagatttatcaccatacaatgagcacattgagtcactggctttcagtgaccaccatgactttacagcaagagatatggaactgataaagaagcgtttcatgaaacttccggaaggtaaacgcatgattatcaccactgaaaaagactctgtacgactagcagcccatccactgatggacgaaatgctgaaaccttatatatatatgctgcccattgaggtagcctttttacaagaccaacaagaactgtttaactcaaatataaccgactatgttagaaaaaattcaagaaacagcaacttttcttagagaaaagatgcataccagtcccgaaactgctattatattaggtaccggcttaggaagcctggtacacgaaattaccgataaatacgagatcagttacaaagatatccctaatttccctgtttcaaccgtagagggacatagcggtaaattgattttcggcaaattaggtaataaagacatcatggctatgcaaggacgtttccacttctatgaaggatactccatgaaagaagttactttccccgtacgggtgatgcgtgaattaggcatcaaaacattgttcgtatccaatgcagctggaggtacgaatgcagactttgaaattggtgatctgatgattatcagagatcatatcaacttttttcccgaacatccgttgcacggcaagaacattgaatacggcccccgtttcccggatatgagtgaagcctactccaaagaactgatagacaaagcactggagatcgctaaagaaaaaggtatcaaagtacaacaaggagtatatatcggtacacagggacctaccttcgaaactccggcagaatacaagatgttccacattcttggagctgacgccgtaggtatgtctaccgttcctgaagttattgtagcaaaccattgtggcatcaaagtgtttggagtatcggttatcaccgacctaggcgtggagggaaaaattgtggaagtttcacacgaagaggttcagaaagcggcagatgaagcgcaaccgcgcatgactaccattatgcgtgaaatgattaatcgaatttaagaacatgcaggaaataaacagaacagaaatagcgaccttaggtgagttcggcctcattaaacatctaacgaaggatatcgagttaaaaaatccggaaacccaatatggtgtgggagacgatgcagccgtattggaatttaaagataaagaggtattggtgaccacagacttactgatggaaggggtacattttgatttggtttataccccattgaaacatttgggatataaatcggccatcgtaaacttctcggacatttatgctatgaatggtactccaaaacaaatcacagtttctatcgcactgtccaaacgcttttgtattgaagatttagaacagttctatgatgggctaaaacaggcttgtgaactacaccatgtagatattgtgggtggagatacaacttcatccgtaaccgggctcgccatcagtattacttgcataggtgaagcggacaaggacaaagtggtttatcgcaacggcgcacaagatacagacttgatttgtgtcagcggtgacttgggaggagcttatatgggacttcaacttctagagcgtgaaaaggctgttttccaaggagaaaaagaagcaaatccggatttttccggaaaagaatatattttggaacgtcagttaaagcctgaagcacgtaaggatatcattgagaaactggcaaaagcgggaatcaagcccaccgctatgatggatatttccgacggcctttcttcggaactgctacatatatgctcacaaagcgataccggctgtcgcatttacgaggaaagaattcccattgattaccaaacggctgtaatggcggaagaactgaatatgaatgtgacaacatgtgctttaaatggtggtgaggactatgagctattatttactgtacctttaacagagcatgaacgagtttcggctatagagggtataaaagtgattggtcacatcaccaaaccggagctgggatgtgccctgattacccgtgacggacaagagtttgagctgaaagcgcaaggttggaatccactaaaagaaaaataattttaattaaacaacactgataataagcaccttatgtttttatcagtgtttttttttagaaatagtttgtagtttaaaaaagtttcactacctttgcaaccgcaaacaagaaataatggtgccatagctcagttggtagagcaaaggactgaaaatccttgtgtccccggttcgattcctggtggcaccactttgaagaaaagcaaaagacagtaaaatcctgatttccaagcgaaatcgggattttttgttttcccccgacacgcaaaaaacggcaaaatattaccgtttgaggtggagcaaaaggtggagataaaaggtggagcaaaaatctccaccgaattagagtctttctcactgatttgcaatgttttgcgtatcaagaaaacgtggtcggtttcctacttttgtccaaactaaaaactgtaggaaaaatgaaaagaagttcattcaatgtgcttttcttcttgaagaagaccaagctgctgaaaaacggagaagcatccgtttgtatgcgtatcactgtagatggtacgcgagttgaaaacaacatccgcaaaagcattgacccgtctctctggagtcaggctaaggaatccgccagaggcaaaagccgcaaatcatgtgatctgaatgcctatatcgaaaatgcgagaatcaaattacatcagattttttgtgagttggaagaacagaaccagcctataacggcacgtctgttacaggaaatatttttcggacaggacaaagaaccggaagcggtacgcaccctcatcggtaccatgcaggagcacaatgaccaatgccgtgccctagtcgggaaagactacgccctgattaccgttcgccgttatgaaagctgcaagcgctatcttgccgaacttatcagacagaaatacggaaagggtgatctgccgctggcgggagtcaacggtgagctggtacgtgcctttgaattttatctgaagacggaaaaggaatgtcagcagaataccgttatccgttatatgaaatgtctgaagaaaattaccaatctggcactggccaatgaatggatagccaaagacccgtttatcggtatcaagttccacgaaaaagaagtaatccgtgagtttcttactatggatgaactgctgaccatctaccacaaggaattttctctggagcgaatcaccgtagtccgtgatgtttttattttcgccgcctttaccggtctggctttcatcgatgtgcaacaactttcccctgagcatatcgtaaaagacaacaacggaaacctgtggatcaggaagccacgtcagaaaacaaagaacatgtgcaatattccgctgctggatattcctttggaaatcctgagaaaatatgcagattatcctgcctgcaaaaagaaaggagtattgctgcctgtcccctgcaatcagaagatgaacagctacctgaaagagattgccgacctatgcctgataaagaagaacctgactacacacaccgcccgccactcgtacgccacatctgtctgtttggccaatggggtaagcattgagaatgtagccaaaatgctcggtcactccaatatcaagatgacgcagcactatgcaagggtactcgacagttccattctgaaagatatgaataatgtaagggatgtactttcaaattgtctgtagcttatgaaaagagaaattatccatataatggaggacggcagaattgttattcctgctgtccatcctgataagattcgtatggacgaagccgaacttgtcggtttgttcaatgtggttgcaccgaccttacgagcagcgaaaagaagaatatataaacttgagattttgcaaccattcaccgcagaacaacgtattccgttaaaagaggggtatcaggtagtctataacctggaaatgatatttgcgcttgcctttcagattaatacttatccggcacaacaattacgtgagtatataataagcagactgttccaatctgaaaagtcaatggttatctgcatggtgaatggaaatcataagtcatatctaaaatgctgataaatattgatttcagtgtttcatgcggataataagccgcaaattttgcggttaattatccacatataataatataaaaatatactctcataaaaatgttctagatctttaatattccaattaattgtaacactcaaaataatagagtaattttacaaaatatcaatcaaatgtcattatggtaaaaaagaatagaaatattttaagaaacaaaggaaaaggaattaaactcaatcaattattgaaattatataaacaatgtaaacataaacattgtcccattcttatgcttcacaaaaaacaacattcatcaatgaatgaatgttctatttttaattcaagtgaaacaatagaatatacatatccacaaaaaaatgatgttttaatcaagaaaccatcagactacagttctttgtcaatggtaagacagagcaataatttgaaggaaattttaataccagaaggatattacacaattgccatcgatactttaataaaagcgcaaaatagcaataataatataacgaaagattctttaattttcccaatcctattctgttttaggcattatttagaaataataatgaaggatactattagaaaattcaaaatagcaaataacgaaattacacctgaacaaattggctatgacaaggaacatagcttattaacaatttggaatcaattaaaaaagtatatacaacagactcaaacagtagaatgtcaagcctttgagaaacttataaatgaaataaatcgaattgataataaatcattcagtttcagatatgcctatgttgggactaataataatgaagaaaatattaatccaatattcaaaaatgaaattgatatcgatttagacaacctaaaatctgttatggaaaaaatgcacaattttattgaaggtatttcggaattaacttatcaaaattagtagcaaatcaatcatctacatttttttgtataaaattcctctatttacgaaatcctgtatagtaagtacttgtcatccccatgcccgaagatttataattgttcatcatacaagcataaaggctgtgtgacatcggttcatccagaccggcactcagcctttatgcttatcttttatttactactcatatatgcttcccgataactctcctgaagcattttctcaatatcactctcccggtataggattttacctcccaactggtaataggatattctcccttcattacgataatcctgaagcgtgcgtctgctcagtttcaattgtgccgacacttccttgtcggtcagatagcgttcaccacccagtacgggacgggttccgaccgccagattctcaatcccgaccagcatacggtcaagacttcccatgatacggtgtacccattctctgctgtctgttctcagttcactcatgttattatggatttagtggttattgtttaactgttatatgttacgtcctctgtaaagagcctcttttcttctgtcctcaactttcttgacgataccctgcacatcttccggcttgtagaatatcttgtgattgatttgggaaaaaggcagggtaccgttatcacggagtgtctgtaaggtacggggcgagatgttcagataccggcatacgtcctgattatccatccacttgtgcagcgtcctgtcgttctcccggttacaaatttccatgacccgatgctcaaagtattcaaacttacgcaccaattcctcaaacagttgtttttctattcctacaaattccatatcgtttcctttttttgttgattgatgtttattcttttttcgttgtttgcgacaaagaaaagccatatatttgtagatactaattgaaaagtgcgccaatattccagttgaaaattgcgccaccataggataagtataatgacctttgtataatccaaatgcaaaggtaaaatgaagactatggtagaaagacaatcaataatacacatgtatagagtatgcggttatagcaaacggcgtatctctcgtgaacttcatgtcagccgtcataccgttgacaatattctttcaaagtacgaatcagccatccgcacggacaatccagaagaggctttgagtgatttgcttaccatccagcccaggtatgacagttccagacgccgtcctcgccggctcacacaagagattaaggataagataggattttgcctgaagaagaatgccgttaagatagctaccggacttcgcaaacagcgcatgttgaaaaaggatatccaccagtttctgttatctcaaggatacaccatcagttacgccacagtatgcagttatataaaaaatatagagtcatacaaagagaagaaaaagagcgaagcctttatccggttgttctatgagcctggatgcattgccgagtttgactggggtgaagttcttctttttattgacggcgtcaaaaccaagttttatctggccgtattcactttcgggcatagcaatggcagatacgcctatcttttcaggcatcagaatacgcttgccttcatggaatcccaccgtaactttttcagggatatacatggtgtccccgccatgatggtctatgacaatatgcgtgtagccgtcaagagctttgtcggtggtgataagaaacctacagaagctttgatgaagatgtccggtttctattgttttgagtaccgtttctgtaatgtacgggccggatgggagaaaggacatgtggagcgcagcgtggaatatgtcagaaggaaagctttctgcctgacagaccattttggtgatatacattctgcccaggagcatttaaaccgggtatgtatgcaggtcaacaacgagcaaggcagtctttcaacagcggagaaaacatcacgtctggaagctgacctgtcatcgctgaagccttttcccggtaatctgggctgttttgaggtctatgagtacattgtggataaatggtcaactatcagcatgaaaaatgttcattattccgtacctgattctcttgtgggagaaaaagtacatgtcaaggtttatagtgaaaaaatcgtcatcctgcacgggaaggagaaagtggcctctcatcaacgcagttattgcggtggagactggtgcatcaagctggagcactatttgcgtacactttcccgtaaaccgggggcattgccccactctgtggtttggcaaagagcaccggaagaactgagaaggctgtatgacatccatttcaaggaggacaacaggacgtttgttctgttgctggactatgcccgaaaaaatggattttccggaacggacattgtcacggcatgcaaggagctgaccggacgtggtgtcagaaagatatctccggaccaggtaaaggccatgctgcatggtagcgtacagggagagacagaagaaaccatggaaccgcctgttctcccggcacaacaggagaatatagaaagagaagctgtggatatgcttgaaggcatcacggcgctcatgacaggatacaatgaagtgcatgatataataccaaccatttaagtttataatatatgaaatcagaaaaagaaaccatttatgactatgctgcagaactgaagcttctggcctttaaagaggaactggaatgcaccctttcattggcagctgaagaaaactggaaccatctgcagttcttgacggaattgcttggaaaggaaagcgccaggagaagggagtgtagaagaagatcaaggataagatctgcgggatttccacaaatgaagtatctgcatgagcttgttatggaagacatgcccaaagaggcacaggtaatattacctgaattggagacactggacttcatcagacagggaagaaacctggtcctgtatggaaatccgggaacgggaaagacgcatattgctacggctttaggaataaaggcctgccaacaggactttaccgtattgtttacttcagtgccggtcctgcttacccagataagggaggctaaatcagcaaagacactgaggacgctacaattaaggtttgaaaaatacgatctggtcatctgtgatgagttcggatatgtcagttgtgacaaggaaggaggagaactgctttttaaccacctgtcgttaagagccggaaaaaaggctacaatcattactactaatttggcttttaacagatggaatgaaatcataaaggacaaggtgcttgtggcggcaatggttgacaggcttacacataaagcttatctggttaatatgaccggactgtcttataggcttaaggaaacacaaaaaatgagacaagataaatgaatattttaaacttatagtaattttgtaacaagttatggatggagctcttttcaattagaatacagcgcacttttcaattagtatctacagagtaacatagggagttactgccttttttaaggctttgaggcacatgggaattgtatctccgattgtaccgtctaagtcaaaggctactaatttaatcataaccttacatttgattgattttccgtatcacccggcaaggatttcctaccgccaagctatttgccggaatatctttggttacaacacttcctgcaccaatcacacatttttgccctattgtcactcccggtaaaataattactccaccgccaatccagcagccatcctctatcatgacagggagggcaaaagttcgacggacatacttacagccatccggggtttctgtcaatacaagtcgttcattaaactctaccgggtgagttgccgtatagatttgtacattaggtgctaccagcacattgttccctatggtaatcttattgcaatcgacaaatgtacaaccagtatttacggtgacattatcaccgatatgtatattgcatccataatcacatataaacgaatgaccgacagaaacatttgcgcctatacttccaaacatttcctttagtacggcatatttttcagtcttttgttcatacggcaaagaattatatttcatcaacaagtgatgagctttacttttcaaatccataaaaaacgggtcgtggcaatcataccattcacctgccaaacatttttccatttcagttttcataagctataattttaaatatattgcaaagttataccgatttttcggctaattttaggtattatttttcgttattttggtattaatccgttttttagggctatatttatggcatgaaaagagaaaacctacatcaaccattcgaaattagttttagcgagcttgccgaatccttgctaaaagagcatgaacataccttttttgaattagtatatattctttcaggaacaggcatccaatggattaacaacaatatgtttccttatcatgacggacatttgtttatgattactcccggagatacgcattctttcgaaatccatacaacaactaagtttgtcgacatcaagtttaacgacatatatatacattcttctgttttcggtgctgaaaatatccaaagactggagtttattcttcaacatgctaatcatcaacccggttgtatactaagaaataaagtagataagctattggtgaaacccatgattgaagcgattatcagggaatatattaaccgaaatttatacagcaaggagattataacacaaataattaatacgattattattgtggtagcacgcaatatcgcaatgttcttgcctgaacaggtggatgaatgctctgaggacaaatcgcttgacatattgcagtatattcaagcaaacatctataaaacaggtaaaatcagagcaaaagatataagccaacattttggcatttcggagaattatttaggacgatatatcaaaaaacatactaatgaaactatgcagcaatacattttaaactacaaactaaagttagtagaaaatagattattacatagtcaaatgagaatttgtgaaatcgttgaagaattgggatttaccgatgagagccatcttaataagtttttcaaaaagtatagaggatgcagcccctctaatttcagaaagaacaatttgaagtaaaccatatatatatccttgtttttagagttattaaaacaatagaaatgactatttttgcattatatttatagatgtctatgacaaatacagaaaccatacaatcacttatcgatagcggagaaggctataatgtagagtttaaagttcgtgtaccttcaaaagttcgtgaactaacagaggaaatttgcgctttcgctaatgctgacggaggatatttgcttatcggcgtagataataacggacagattattggtacaggtttggaaaatgacaaacgttcagccattcaaggctctatcagtgaaatatctccagctctccattgtgatatgtatgcggtaaatatcgaggataagacagtttgggtaattgatgttccatcagggaaagataaaccttatatattttccggttctatctttgtgcgtgagggagcaaactcacagaaacttcgtactgtcgaagaaatgcgcagtttctttcaggaatgcaacaaaatattttttgatgctatcccttgttcgtggttcaacatttacacagatgcagatgaacaagcgataaaagactttcgcacggaagcaaagctaagtccatcgactgccaacaaacagatatttgagaatttggaactgtttacggataacggagtagccaagaatggaacagccatgttctttgggaaacaacctgaacgaaagtttccacacgcagtaacaagatgtgtccttttcaaaggaacaaccaaagtatatatcattgatgataaaacctttggcggtccactataccaacaatatttgcaggctatggcatggctagaaagtaaactgcaagtagcttataaaattgagggagcaggaccaagagaagaaatttgggaaattcctcttactgtgtttaaagaagccattattaacgctctctcacatcgtgattattacgaacagggagcaaccattacaatagaaatgtttgatgaccgggtagaggtttctaatcccggagggcttttgcctatcgtagctaaagatttcggacacaagagcatgacacgcaacccattaatctttggattgtttacccgtatgcatttggttgaaagggtggcatccggcattccccgtatgcaagaagctatgaaagaagccaatcttcctgagcctgattttcatacggacgggatgtttacggttatattcaaaagaggtatcagtatcaagaatgatactgtaaatgatactgtaaatgatactgtaaatagcaaggagaaagaagttttaaagataatccagaaatatcctggactcaattcgtccaagattgcagaattaataaagaaaagtattccaacagcaaaacgccacttaaattctttagttaaatcaggtttaattgagtttaggggggcacaaaaaacgggggggtattatattataaatcaacagtaagctacattatcatagcattattaatcaatataactgtttggcatatgaatactgatgaaacaatcaataaagaggagttgactttgcaaaacactcctaaagcagtaaattatcttataaatgaaattgctgaaatgagagttttacttgaacatatagagtcacaattaggtttaggggttgataagcacagacctataaatattgaaaaagcatgtcaaattctaaatcaaactaaaaatggcatcaataaaatggtcagaagccgaaccatacctcattatatacaaggaaacaaagtttatttctttgaggacgaattaattaaatgggttgagaagggacgtgttgctactctacaagaaaaatatacatcaaagagaaactactaatactcaatcagtatggaactgacacgcaaagaattatatgacttagtatggtctgagccaatgacaaccatatgtaaacgttttggtctttcagataatggtttaagaaaacgctgtaaatcgatgaatatacccacaccacctttggggtattgggcaaaactgaaatatggtaagcaagtcacacctctaccgttccaacaagaggaaacaaacgcaactcaatcaacaacacttcaagaagccaaagaacctaaagtagaaatggagaaatccgtaaatccatacaagcaacgtgaactggaaatttgcagtggtgatatttcatgctttaaggttccagaagtcttatatgctaaaaatcctctaataatcgacacaaaagaaaaattcagacagcgatcagaaaatcaatatttaaagaaaaatccctataaaagtaaaataagagaaacgttagacctctatgtttctgagaatatgctagatagagcactatctatttttgatacaattataaaaggcttaatttttagaggacatagtattaaatgcaaagacaatcagacctatgccattgttgatggtgaggaaattcaaataagattaactgaaagaaaaaagcaaaatcctaatagcagtaatcgctgtgataacaataataatatcttttctggcgaattacagttttatatttatcatagttcgagctttcatagcccaacactagttcatgatacggcttatactaaaatcgaagataaaataattagtatagtagcatacctagagattgaagcagataatagaaagacagaacgtattgaagcagaagagagagaaaagcgacgtaaagaagaagaacgaaaaagagaagaattcgaagaagagaaaagaaaagagctagaagactttaaagacctattatactctgctgaacgttttcgaaaaactaatattttaagagaatatattaatgcatttgagaaccatgcaattgaagatggtgaaactgatgatgaactgctagcaaagatacaatgggctagagagaaagctgattggcttgatcctttcatagctaaaaaggacaattatctcaattcttatgatatggatcgaatattacaggctgctgttccagaacgaagctatcgcaattcagggtactctttttggactaaaccttattggaagaaaaaacgataaccgtattcaaattatgaagagcaaaatattgctttcatataataatacttatctttgcattcagaaatcgtacccaagatacaaacttgtgttgaacggtgcaaagctgtgaaaaccttattcaagggacttacatcgtagcaaagatacaacttactgaaagatagtgtcataacaacccgttttcggttgctggtagcaccaccttgaagaaaaaaagacagtaagaaggtgtgtcgtaatacacgatgcgccttctttttttcattgactataaaaatcgactcatttttttaagctgcgatattttgaggatttctttgatttatgcgttcgcaacatctaaatagaacaactgtaagctcataaaacggtctaatcagccaatccataccttctttagtcatttttgcacacatcttttttatattgaaggcaatggcaaagaaggcaaagtccatgaagaccttatcctttccaaaatggcggaaacgtttgtaattcatattgtttttcatttgtccgaacacggcttccggttctatgcatctctgtcctctgtgtttcagcccttcctctgagcagagcaactctttggctttttgcttgtattttctgagtctgtgattcaactctatcgttctgttcccctttgctttaaaacatcggcatcttagcggacagccttcacatctgatggctctgtacctggcattttcgctgacatatccggatgctgttttcacatgtctagtccctatcctttgcatcttctgtcccatggggcagatacaaaagtcttgttcttcattgtagtagaagttttccgccttgaacgggtccggtttgaatctcggccgctgttccatgtggaagtagttgtacttgacgtaggcttccataccgttttctgacatgaagcggtaattctcctcagaaccgtagccggaatcggcaaccaccgtatgggccagcctgtcatatctgcttgagaaggattgcaggaaaggtatcagggtcagtgtatccgtagggttcgggaagagtgcaaagtcggtaatgaactggttcccggtgccgatctggaggttgtaaccgggctttgtctggccgttacgcatggcatcctccttcattctcatgaaagtagcgtcattgtccgttttggaataggaattcctgtcctgcagcgtgtccagacggttgtcgtattcctgtagcttgtccctgtgctcttccaactccttcagctgtttgcgtttctttttcaacgcagtcttttcctctttcgtggagggttcaggaacctgttcgagtgcttgacgcaattctcctgccatttcagtcagcatggccggagtgaactcaatctcctcattgctttccgatgagttctcctgggcgatgacattgtctatctgccctagcaggatatgtatcttcttcatcaggcgttcacggttccgctcaaccgttttccgccagacgaaagtatacttattggctttggactcaatctttgtcccgtcaatgtattccacattcaagctgatgaagcctttggaagagagaaggagtacggtttgggtaaacacctcgttgatttcattcttcacccggttgcggaaacggttgatggtaatgaaatccggtttctcatatccggcaagccagatataatggatgtcacggtgaaggagcttttcgattttccggcaggagtagatgttgttcatataggcatacagaatgaccttgagcatcatcctgggatggtaagggctgcgcccgcattccttatacaacttcctgaaactttcaagggtcaggctctcaaccagagcgtcaaccatccgaactggatcatgctctgcaatatcctcgtcaattcttggaggaaaaagcactgtttggttgggattgtaaggacgaaaatgtatctttgtcatagtataaaatgttatgcttaaagatacaaaatctttaggtaataacaaagcccctgcttgtgaaagtcggggctttgtgcataaaaaaagaaggtgcgcattttgacacaccttctttattttctcacaaaacgcaaaatacagcaatatagactggatgacgaggtatacgagctttccgctcaattgtaactttatccacttctgacctgcctccatatttgattaagtcttggagcaaaactactccttcccgatataaatcccaatttgatacatattaaaaaacactttatacttgaagcataaagctggatgaattcatctttatagagttcccgaacatcttcgggagcatcatcaagagtataagcagaaagattcttacgcaaagattccatatacctgcccacatcttttcctgcgtatagctagcaggatttagtttgaaaatattttctccgctaaatgcaagaaagcggttctgaagttgtttatcattcacacattctttctttataaactcgtcaaatcacctctaagcttctactacaacaagtctattttaggctgcaatattctcaaacttatataatatacatcttaatcatcgacgaacggcaaaaagttcagcttcagtttcccaagtaccatccggacgttttaccatacgttgccaacggaatgaagtcgttgtaatttctgaaaacacccactgtatattcttctcattaatttccgtctgaacaatcctgtttccttctctttttccttccagttgtgtagcccctcctaattccgtatataaaatatcccatgcctctgtattaggattatacatacgtaccgcagtcgcataagctgcatccggttgataatctttaatccgtgccttacgcgaagggcaaataaacacatcttgaattgcagtcccttccagcacccaagcgaatatccactctccctgaacatgtctttcgcctgttgtaccttggttatcaacccattcaaaatcccattcaccgacaaactgtccatacaggttatctttttccggtatcaaattgcttttcccttttgacactaatacatttataaattctcccatactttatttactgactctagattagacaaatataagatttataattaataatcactaatattaaagcaattatctgtatgcaatatccatgtcgaaagcaaacagatgcatagtataaaatactggcttccctactcccaaacagattttttatattacaccccaaaaacatttcatttacaaacttattgcaaaaaaagtatttggccattaaatctcaattattcaagaaagaagtaccgataaaaagtcttttttccctatatttgctaggctgaaaaaaatgtcattaactcaattaatatgaaaaaactatcgtttattattgtatttgtattcctgtccattctttttgtacaggcacagcaagcaaagtatgtattttatttcatcggagatggaatgggtgttaaccaagttttaggaacagagatgtatcgtggagagttggaaggcaaaattggtgtgactccgttattattcacccaatttccttatgcaaccatagccactactttctcggcaaccaacggagtgacagattcggccgctgcaggaacagcacttgctacgggaaacaaaacaaaaaatggcgcattaggtgtgaaaaaggatttggaaaccaaagttaacagtgttgcttcttgggcaaaaaataaaggttgccgtgtaggtatcagtaccagtgtcagcgtagaccatgccacaccggctgctttttacgcacaccaaggacaaagaagcagctattacaacgtgggtctggatttgattgatgccaacttcgatttctatgcaggatcagactttttagatcccaccaacaaaaaagccgccggttcaaattcagaaagtctgtacacactggtggacaaagccggatataccatagcccgtggctacaaggactatcagaaaaaagcaaaaaaatcggacaaactgattctcttacaacctgcgacagcaacagacaatagtgctatcccctatgctatcgatcgaaaaaaaggcgatatgactttaactgaaatcacccgtgccggaatcaatttcctgtctaaagatctatcaaaagggttcttcctgatggttgaaggaggtaaaatagactgggcttgccacagcaacgacgccgctaccgtattccacgaagtgatggatatggacaatgccataaaagttgcttacgaattctatgaacaacatcccgatgaaaccctgattgtagtaacagccgaccacgaaaccggaggaatcgttttaggaaaaggtccgtatactttgaacctgcaagctttaaaatcacaaaaagtaagtgaaagcggatatactaaaattgtaaacgaattaagaaaaaaatacaagaatcaagtaccttgggaagttatcaagcaatcattgaaggataatttcggattttgggatagtattcaattgaatgaaaagcaagaagcatccctgaagaaagtatatgatgaatcatttagcggtaaagagatagatttgaccaaaagtgaatatcaacaagacgaacctttggcagctgaggccaaaagaattctggatgacatcgctctggtaggttggaccagtggtgggcactctggaggttatgtacccgtattcgctatcggagccggcgcccaactattccaaggtcgcattgacaataccgaaattccggtaaaaatagcagaagctgctggttatcccaacaattaatcaaaagcaagatagtgcgacaaacgttccaagtctttctcagtgaattcctcatacaaggataactgggaaagactttttaattttccctttttcctcctatattctataattacctttgcctgataaaaattcatataaggatgagagcgaagtttgtcaagcccggccttattggcatttatccgatgaattggtgcatttccgagtttaaaccatctcaacatatcctcatctacatagttcacttccttcaactgagccatatcataaaaacctcccaaacgtttccggtaagccacaatcatgcgtgcaatgccactgcctattcccggaatctttttcaactcggtagtgtccgcttcattcaaatcgactaaagttccttccggatatttataaaccgccaacgtatctttctccgcctttttgataaagtgcaatgtatcctgtttccgccgaaaagcctctgatatctggatataaggttttaacatattaaatttctcggacgacaagccataaacacgagagaaatcatccgctgtcctgaatttaccgccggctctccggtattgcaaaatagtatgtgcaataaaaggagacaatccacgttgcaaaaattcgatggaatcggctgaatttggatcaaaagcagccaataccacctctcttcttttaggcttatcataggaatatcgcagagattccttctcctccatctcatgtactccggccagaaagttttttatttcttctatcccctcttgatcctgttccaaagactcttcctttactggaaacagaacccatatacacataaatatgaaaagcaaagtcaacaaaaaaagtatagctctgcgttcgcttttcgaaaaatagaagaagtctttccacattacaattctaaattagccctaattcattgataaaaatcaaaatgatagccacaggtgccacgtatctcaacaagaagatatacagattgaaaagacctgctttcagttttcccccattggtcaattcttcataagaaacggaacgtttcaaataccatcctacaaagatacataccagcaagccacccaaaggaagcattatttttgcagtgacaaaatcaagtaagtcaaagagtcccttatcaaacagcgtatatttctgcataactcccaatgacaaggaagaaatgactccaattataatgcacccgaaagtgaccaatctagcagcacggccacgagttaaattgaattcctcgtgcagaaaagccgtcaccacttcatgtagagaaatagtagaagtcaatgcagccaaagccaacaagacatagaacatcaccgagaaaatataagctaatatcggcacaccgctaaaagcttgctgaaaaacattaggcaatgtaataaaaattaatgatggtcccgcatccggctggatacctacagaaaaggccgccggaaaaataatcaatccggccaagacagccacaaaagtatcaatcacaccgacactcagagccgtatttcccagtttggtttctttcccaaaataagaagcataggttgaaagacatcccattcccaaactcaaggaaaagaacgcctgccccatagcccctaagaaaacatctccgttcactttactgaaatcaggcttcagcagaaactccaaacctttttccgcattgggaagcgacaatgagcaccccaccaaaactactatcagtacaaacaaaacaggcatcagcaccttcgaagatttctctatcccatctttcactccctttactataacaaaatgggtggccaataaaaagatgaccagccagataagcggacgaacagggtccttcgaaaaactctggaaagcaaccacaaaatcttccggcttcttatctgcaaaaccattcattcccgcttccaatatatattccaaagtccatcctgccactaccgaataatatcctagaataagaaaaccggccaaaacccccaaatatcccaaccacttccaatgagttccgggtgccaaaaccttataagcacgtcccgtacttgcttttgaatgacgacctactgtgaattcggcaatcataataggcattcccaacataaaaacacacgccaagtatactaagataaatgccgcacctccatgatttcccgtttcatagggaaacctccatatattaccaagtcctacagccgaacctgccgccgccagaacagccccaatcttacttccgaaatttactctttcgcttttttgcataaaaaactatcaaattattataaatcaacactggttagcctgcaaaagtataaaattaatcgtacttttgcgacgaatcacaaaaaaattaaagtatgctatattattttagaaaatatccggtatccttgatcattgtagctatcatcttttatctttcctttttcactcctcctaaaacagatgtggaagaaatcccctacatagacaaaatagtgcatatatgcatgtatggaggactctgtttcattttatggatagaatacctgaggaatcataaggctatcaattggaatcatgtaatatggggaggcatcatagctcctgtagctatgagcgggtgtatcgaactgatgcaagcttattgcacagatacccgcagcggtgactggctggattttctggcaaacagcattggagtcggactagccgccttaataggatattacttacttcgcccccttatatggcgtaaatcctaaaaagaaacgccgacgattcttcgcgaacagtcggcgtgatgataaaagtcaaagttatataataaagatagagagtcaacttaacggaaatctttcagatcattctgcaacctctgacgagtgaaaaagatacggcttttcactgttcccaacggaagtcccagtttttcggcaatttccctatatttaaatcctgatacatacatagcaaacggcacacggtaatctttaggcaacgcattcacgatacgatgtatctctttcaaatcataagcaccttctgtagaatcgaatcctgagtcctgtggaagattcaaatggaacaagttatctgtctgatcgacgaaagtctgatcacgcactgttttacgataattatttataaatatattacgcatgatggtgtacatccatcctttaaaattcgtatctggagtaaacttctcttcgttgtccaaagctttaagtgaagtttcctgcaacaaatcattagcctcttctctgtcagctgtcaatttaaatgcaaagcgaaataattcggtttgtatacttagtaaatgctgtgtaaagtcgactgtcttcatattaatctatttttaaattgttattttctgtttttgctttctgctgcaatattaacgacttctcgcaaaagtcacgacagaaaaactaacaacaaagggggtataaactatcaaataacagtttttaccccctaaattaacagttaacaggtggtttcgttttaacttttaattagccggtatccctccaccggttccagcattacctcctccacttttcaaatcatcattattaatgcttcgcgcagctttttttacctgagccttcaactccccaaaacgccaactgatattaaatccataataacgcatcggaattctggtagcagtagaagagcagaaagtaggagtattgatgttattcttaaaagtaatatatttattaaataaattggacgagttaagagatatagtcagcctcttttccttcaagaaagaacgactgagccctatcgcataataatagaaagaggaacttttaccttgcaaagagatatgcggagtaccaccccctccgttcagactcagacgcagatcccaaggcagagtctgctggaagcttccgaagacatttccttcccagccatgattctttaaatcaagccctgaacttctataatccacataagctccccgtccattgatattaaagcgggttttaggagacatattccagttcaagaacaaagacaaattaatattcttactttttcctatattatcataggtagaattcatcacaccatcttttataaaagagtattgctctataccattattgacaaaagaataattagcactgacatttacattaaatttctgcgagaaactaccgaaagtaacactaagcgaatgggccttttcactttccaaatcaggattaccgtaactgatcgcagtagggttgctggtgtcagtaaacggattcaaaaaccaaatacccggccggctgatacgcatattataagatgccctcaaactttgagtaggagccaattggtaagagaacatcaaggatggaaccaaatcatcaaactgagcatcaaacttctcatccttatttttataatccgcatccataaatgtatgctcatagcgaattcccgcctttccaccgagttttttgtacttcagctgatagcccaaataagcagccagaatatcctgcttatgatcatattgcgtactcatatcctgatcatacttatattctccggttttatcggccagataatatttaccatcacttttacttctacgaaaaatatactttataccagtttcaatgctgtgtatcgaatttatcggattggtatagtccaattgagccgtatgctcttgtgtgctggcatcatttttaaaatattggttttgcaaaagataaggaacattcaacgtatcctcataatccgtattcgcttcactgttattgggggaatggctaaaacgataagagaaagtaagaagttcccctttctttttaaacgaatgctgataatccatgttgccccccacttcgccaaagcccgattcattatttcccaaagaaccgtaaccgtaaaccggattaccggcatgattcgtcatctgggtatttccaatcctcttattcgtaaaattgccagtcatcagattcatagaaaaactaatcagattcaaagtgtcaatctcataacttccttccagactgccaaattgaaaattgccatagctcttgcttcttcgatgcgactccaaaaatttattttcctgagacgtgaaatcctcacgatatgaatcttcaaatcccttttgagatccctggtagttataagaataattaccggtaacagtgaacttgcccgactgcaccgtaccataaccgccaccatacacacgcatattgcttgcaccaccattcaatgtcaccgtatatccttccattcctgctcctacagtgataatattcaagatgcccgccaccccttccgcgtcatatttagccccaggctcggtgataacctctatagatttaatggaattggccggcatactccgcaatacctcggtaggattattgctcatcatgttattcggcttgccattaacatgcactttaaacttactgctaccgtttacttgaattttatcctctccatctacagtcaccagcggaactttacggagcatttcaagagtcgtattagttttagaatccggatcatcctctatactatacgtcactttgtctatttccgcctttaccaaaggtttctgcgctaccacctccactcctttcaacatttcagtcgcttctgctatcagaatcttacccaaatcaacattcctacgatttgccgatatcgaaaactccttctgtacaggagactttcctacagaagtaaaatgaatgagataagtccccggcacggcaagccgttcgtcaaacctgccgtccgctcctgtcacagccagtttcaccggctttgcaggattgttcttcaatgaaatacggattgtagaatacggttccccttcattagacaaagaatctaataagactcccttgactgagaactggccttggacagccttttgcgccttcgccgtaaatgacaaacttgccacaagcaagataatgccccataaaatgttgtgtttcatatatcaataatgagtttgtgtttgttgcaaaggtaggtaaacgatagcaagtagtttattttcagacgttaaagaagcctatatattatctaccagcgagtataaggattcttcatcaaaaaagaattataataacgaatatctcccgttacctctttttcgatgaaatggggctttttgaacaattcgtcctcactattcaattccacttccgctacagtcaagccttcattctcaccataaaactcatccacttcaaagatatgctctccacttttcaccaaataccggattttatcaatcaccccaggctcacacagtttcatcaactcttcggcctcttgcaaactgatctccttctcccactcataacgacttgtaccggagtcattggaagcccctttgatagtaagataccctttattatcccgaatacgcacccggacagttcttccacgagcactacagatataaccttgcacaatatgactatgtgcataagcctctagtttataactgtcgtcctttactaaaaattttcgttctatttcttgtcccatagcgttttaatatataaaaaagccccgcagagaataacctcagcaggacttcactatttattttccgtttttatccatacatggcatagcccaccataataacaagggctaatacaattaatccgatgaacagaccttttacaatcctatttgctttctcttcttcccgcttactataagcagctttcttattctttcccataagtatttcatttttaagattaaaccatctcttttgaatatcccaaaagtacaaagtttctagaagaaaacaaataaattacgaagaatttactaattctccgaaccggaaaactccatcaagtatgccttgataaagccatcaatctttccatccatcactccgttcacatccgaagtttgaaaattagtacgatgatccttcacacgacggtcatcaaagacataactgcgtatctgtgatccccattcaatcttcttcttgcctgcctccaccttggcctgttcttccatgcggtgctgcaattccttatcatataaaattgaacgcaactgtctcatcgcattttccttattcttcggctggtcacgggtttcagtattctcaatcaagatttcctcttcctcaccggtatacggatctttatattgataacgcagacgtactcctgattccaccttgttcacattctgtccgccggcccctcccgaacggaaagtatcccaagacatacgggcaggttcaattgtcacttcaatactatcatccaccaacggcgttacaaacacagaagcaaaagaagtcatccgtttcccctgagcattataaggagacacgcgcaccaagcggtggactccattctcacctttcagataaccatatgcaaaactgccctcaatattcatagtcaccgtcttgattccggcctcatccccatcctgaaggttagccacgctcactttatagccattggtctccgcccaacgcatatacatacgcatcagcatggaagcccaatcctgactttcagtaccaccggcaccgcaattaattttcaatacacaatccatttggtcggcctcctggcgaagcatattcttcagttccaatgcctccaccgcagtgacagccttttgatacgctgcatccacttcttcttcggtaaccaaatcatctttacaaaagtcaaaagccaattccagttcatctgccatcgtctttacctcacggtaaccgtcgatccatttttgcagatctttcaccttcctcatttgtgcttctgctttcttggcatcatcccaaaaaccgggcgcctgcgtacgcagttgttcttcttccacctgaaccagtttattttctatgtccagatatctttcaagtgccgcagtacgttcttttacgtctttcagttgctctattgttatcatcttgagaatttttgcatttcaaggtgcaaagatagtggaaatctattcattttcccattattcttcgtacatcttttctatttcggcagcatagttcttgttcagcacattacgttttattttcaacgtattggtcagctcaccacgttccatactgaaaggatggggcaacaaggtaaacctcttgatctgttcataatgtgcaaactgctgctgcagtgtatcaatccgctctttaaacaaatcgataatttccggtttctgcaacagttcctccatactttcatagcgaatacctttttttgcggcatactctttcaccagtttatattcaggaattatcaaagcagaaacaaatttacgttcatcggcaataatagaaatctgatcgatataacggtctaccaccaatttggcttcaatggcttgaggagcgatatacttcccgtttgaagttttaaacaagtccttgatacgctctgtaaggaacaaatgcccatcttttatataacccgcatcaccggtatggaaccatccgtcttcagtaaacgccgctttcgtagcagcttcctttttataatagccatgagtgattccctcaccacgtagcattatttcgttattctcccctattctgacctgcacatgaggcatgatacgccccaccgaaccaaccacatggtcattatcattctcacaagcaaccgttgcagtagattccgtcaatccataaccggctaccatattaattcccaccgacaaaacaaactcctgtacagccggcggaatagccgcaccggcagtagggaagaaacgcccgttttcaatgccaatagtctttttcaacaagctatagatcgttttctcataaaatttatatttcatgtgcaatacaggcggaggagtcagccctttgtacacatattccaaattatgttcacgccccactttaatagcatccagcatcaacttctttttcaatccggttgtctcattgattttttcttgcacgccggcatacactttctcccagaaacggggaacactgcacatagccgtaggacggatctcctttattgtcttctggatatcagcaggacgcaagttgatagacaaagtacaccccatcgaaagacaccagcaagtccatgcacgctcaaacacatgagtaaaaggaaggaaattcataattacatcctgatcacccaattgagggaaacgttcatcgtgtgccggaatggccgcctcatagcaagaatgatgcaacatcacccccttgctgtctccggttgttccactggtataaagaatattggcaagatcaccattacccgactctgaagtacgcttgtctacctcagcttgatgcggatgcgcctcgcccaatttcagaaagtcatcaaaataaatggaagtctggtcccgctcatcacgttttacctccttgtcgaaaattataatctgtttcagttggcttcccagctgcataacccggaacgccacatcatattgcaactgttcacctacaaagatataacgtatttcggcatcacctaccatataatgtacctgcgcctcggaactggtagcataaaatggtacagtaacagcccgtaccccaaaagctccaaagtccacatacagacattccggtttattttgagaaaaaactgctatattttcctgtatgcctatacctaattctatcaatgcattcgaaactgtttttacagttgcggcaaactggttccaagaaaccggaatccatgtttctgttttataatcgcggtaacgcaacgctacacgatcaccatatttccctgcctgacgttgtatcaggacagataagaaagaactactcattccaaagatttatttttaattcatcggcaaagttatcgtttaatttggaattatcctctataaacaggcattaattttcccaaccagtcaaagagttagaagaaatcagccaaaagttttagttgcatatctaacttaattacctacttttttcatcaccgtttaccacgcaaaaatagtatctttgcaacacattaaattattaaaatcaagatgattgatatagaatattacacttccgaagcaaccacattgctgaattcgttaatcggtatcccctcattgagccgggaagaagaagctgccgccgactttctgcagaactatattgaagaaacaggtatcatgaccggtcgttcgggcaacaacatttggtgtatcagtccgatgttcgacctcaacaaaccgactattttactaaattcccacatcgataccgtaaaaccggtaaacggatggcggaaacatcctttcactccgaaagccgaaaacggaaagatttacggtttgggaagtaatgacgccggcgccagtgtagtatccttatttcaggtgtaccgccatctctctataaccgagcaggcatacaatctgatctttcttgcctcatgtgaagaagaagtttccggaaaaaacggaatagaaagcgtattgccccaactacctcccatcaccttgggcatagtgggtgaaccgacagaaatgcagcctgccattgccgaaaagggattgatggtgctggatgttaccgcatacggaaaagccggacatgccgcacgcaatgaaggagtgaatgctatttacaaagtactggaagacattcagtggttccgtgattataaattcccgaaggaatcctccctgctaggccccgtcaaaatgagcgtgacacaaataaatgccggcacgcagcataatgtcatccccgatacttgtactttcgttgtggatatccgcagtaatgaatgttactctaacgaagaactattcaaagaaataagcgcccgtctaaaaagcgaggcgaaagcccgttctttccgcttgaactcatctcatatcagtgccgagcatccctttgtgaaacgcgcggtaaaactaggacgtgtacctttcggctctcctactttgtccgatcaggcgttgatgaagttcccgtctgtcaaaatcggtccgggaaagtcctcccgttcacatacggctgatgaatatatcatggtttcggaaattgaggaagcaataaggctttatatcgagatgctggacggactggtgctgtaaacgacttacaaagacgctatttcccctatagacagaccggtaacctgtgcaattacatcaaatgcaataccggcctgtttcattttttttgcattcttgaagcattcttccttacgaccttgctcaagaccttctttaagaccttcctcacgcccttttttcaactgggtggacatcacactgtaccaatcacggaaattcttcaaactttcccaatactcgcctaattccttaggattgaacttagctatctcggcagcctcgaaaagttccttgttcattgccgtgccgaaaagcagcttgaagccgaaatcggcataagggttgatgtatttatcctgtatgccttctgttcccatatctatccgaggtttaataagttatgatacaggacaaaagtaatcaatatactgcaattccccgtcttaaaagaaagatttaactatctatcattcatagtattttctagataaggtttaataattcctcattattccatctttcagcatattcactgcttaagtctgccgtgatacattcgtgcttattttcccctttttgtaaaccgataactctgatgtcaggaacagttttagcatactttcttattgtgagttccaataaaattcctaagcttatcgatttcatatcaggcggataaaacggttccgcactttgagcgtcatttaaacaggaaaaaataacatctattgcctgttcccacgtaataaaaaaccgggtagcttcaggatctgtcaatataagttccttcctattttctaatgcatacttccattttaccaaaacagaccctgtagaatgcaatacatttccataacgaactatcctataagcgcaattcgatccgtttatttgctcaaaatccccaaaaagattctccataagcaatttagtagccccatacgttcctgaaacttgaacagctttatcagtgcttgttgccagaataaattttatgttctgttcctcaacggttattttaagaagattcaacgtaccaagaatattagtctgaacagctttcagaggatgttcttttgccaaaatgacatctttaaacgcagccaaatgaaatatcccatcacaaccattcaatgcctttttcaataaaagataatcttcaacggggcatggaaagatttgaacgcttttaaatttctccctcagagcaatcagttttccttcattcctggctatcgcatgaatagtatgtccttgggtaatcaaccgttctatcaatttctcagccaaataaccggtagcccccgttactgcaatggttcccatactcaagctattttttatcattcatcaacacatccctcgcaacataaggctgtggagaaaactcaatagtcaacacattcgactctcctaaagctgttaatgtatggacgcaccccggtaaagtccgtaccaaatcccccttttcccaaatctcttctattacagcctcactatcatcatatttctgaaaagtggcatgcatacgcccctgtaaaataagcatatattccacctttctaaaatgataatgattgcctctaagaacctttgggacgaattgcaagaatcctatatatttagcggcttccaccgctggaattgaagcactcaaagtagtaccctcgccaattacaaaaccagtccccgcctccagcaagctataatttttcacatcccctacggattccacttttatcaaatccctgacagttatttcatcaaacattttttttgattgctcccgcacgtcaattttacataatccggcacgatattttaataaaaacaacttatgatgaggagcaaggttctccaatctcaaacactcatccatatccagcaagacaaaagattcaccttccaaaatacggatatccgctgcatcgtccatcaaataagtatgatgaatatattcccacctatcatagtctgccctatactcagaccccaaataggttatagaactaaaatgcaccttttgggatttcttgtgttcaaattcttccttcagttctctgataatgccatctagaggggtttcctcctcctcaaggtagccagaaacaagagaataatatccggggtactctatatccgggttctcatctcttttctgcaacaatactctattatctgttgtagtaataatcacagtagtcgaatccatcatctttttcattttcattattttttaaattttcattctgttgtattttcaccacacccacgtgatgaataatattttccttattcagcatatcagtataaatagcatggtttaacaccataataagcaaccaaataagagacaatatggcaaaaaaaggttgggtgtatgatttcagccataactcccaagactttttctctcttttcaaattagaaggaatctttgtgaaaagtttcacatactcatccggaaaagccttttccgcttcacataacatattcttccagtgctcatgataactccataatctctgcattacgtaaatagaccatattgaaaatgacaatccgccaaatgcaataataaatgtcaggtattcagaagtttgacatacagagttaaacaagacggtttccaatccgaataaagaaacatttattccgaacataatattaaaacggctccagataccagctccttcatactgtaattgaccaagaaggtgagtataatgttccattaatttagtgttctgcaaggcatccctatcatttaccgcttttttattatctacatccgcataaaagtttataccgcatcgaactaatttcgtcattatatcaagaatatatttttataataaaaaaggagaggatattcttctgtaatcagattcatatcccctcctcgcttgaagttatcaagaagaaagcatatcaaatttaaactatactttctatcttagcccgaatgtttactgtacttttcttgttacagttaccttgaatgtcttggttacaacaccccagttatgagtataagtaatattcaagtttacatcatgagtatatactgtaccttccggagttcccttccaagtaagagttgcagtagctgcatcataagtaaagtctgtttcattctcatccaaagaaatttccaatcctgtagcttcagcaacagcattaccggcagcattttttctatacaatgtttcagctatggtttcttcagcagcaatcttagtgacatcgtattttaccaatgtattgccaacagcatctttcaatgtcaagtttgtccattttttataagaagcttctgttgccttaacattcaatgcattaatcaaatcaataatcttaatctgatcgtttgtagccaatgccggattattatacttcaaatcaacaacatcagtgaatgccaagataggttgttccaccttccagtcttcagtcgcaaacaatacacgcttagcagaaccggcagtagcatcatagatatcaactttcaaagttccaaccttagccaaatctacacgcggagtaaagacaatctgattagtgctagtccattcaatattcttgataccgttctgttctttcatcatctcctgaacataagcattctgcttcttataatccaattcaaactcaactgtcgcatcttcaggaacaacattgtacatcttgtcgaagtagttagattccatgatgaatttgctataagcaccgccagtttttgtccatgtaccgataatagtacgactcttatattcatccttgataggacaatcaaagttataggttacagagaagttatctacagaaaccttaaacagcttgtttacgaagctgttgtaaactgcatacggtgtgttcactccgttagtcatcttctcagtagctccccaaccaaagagtccataagaagaagctccggctagcaatgacatattcttgaattgtgcaaagttagcacccggtgtcaaaatcaagaacaaagagtccttatcggcattgtttccaccgttcttataatacaagacagcctcatttttaaccgtttcaagagcttttgccaagtctgtaacctttgcaggaatagtagtcgacaaattgttatcttgataatattgattacagtcatcagatattgattcatatttcattaacttgccaccagcatcatatacaggcttgttcaatgtaatgaatgtgcaatattccttatttttattagaaataacatcacgaccttcaatagcagcctcaaagttacggacatccaaagtaatgatccgggcctgtgagctattgtatgcaaatgtaaagttttccttagcatccaacggtttcaaagcaacggttccaaatacaggattaacagcaggacgaacagccttgatgaagactacattcttcacctcgtattctttaacaccttcttcctgtggtttaactgtagtagtcacttctatcgcagcgtattcatcaatagcagacgcctggttagtcgattttacagacaaaacattatctttaaaatcaaagataccctgacgagttttaataggttgtccattaaatgtataatcctcattctgatccaacaatctgaacactctggtatatgaaatattggttgacttcaaccatacttttgctgctccggaaatgtaagcgtcaatagaatcatttacattataaacaccttgatagtcaaagcatccataagatttaccatcataagaagcaccatctgcattgattattgcagggtattcatcttctttcatattagtagaggtaaaagcatttacaatgctctttacagatgcatgtgttctacttaccgtgaaataatcggaagctgatgtatattgaccatacatagttacatccaatgaggttgcataggtattatttccaataccttcattcggcaaaatagcaaggctcaaaataccgttttctaattttgcagaaccttccatataggtcaaagcaggagcgacactacgaacctgatacgtatcaacaaaggagaatttcgcattattcaatgagaaatcacccggatataccttgaatgaagcataagcaggaacagatgcaaacaagacatccttatctgggttaagacttccttcattttccatccaatagatatcataagctttacaaacatcttcggcatcatcaacagcctgttttctgtaaactacagtctgtaaccctttgaatgcagaaccttcctgcagcaaagtatagttctgtccgtcgatagtcacgattacagtcttgctttcagcatctacagcaatgttaggaaattcattgttctgcttcaaatcagtaactttgtcaccgatcttgatgtattccacaccatccactgtcacccaagacacgtttgaaccggcagcttcaccatcctgacctctggccggaactttgttaccttcggtatctttcacatccacccaagtagcacctttgtctgtgctgacctgccagtaattaccttccacacggaattcagggataacagtagtaccggctgctccatctgttccattcgtaccattcttgatagtaattttggaaccgtcagtgaaaaccagttcatatccaccggtaacctcattacatgactgaacgaatttacctgccttaattgccgagtcaagacttgcaatggtttccttgacttcgctcaattccttgtcgatgcggtcaatgtcatcatcatagtccttacaagacacaaatgttcctgtcgaggtcaccattaaggctccgaacaggattgcacttaaaaactttttgttcataatagaaaaactttaaatttataaatttaaaaaactaaaattggttatacatattaatttcattattaatagcttagctagtttactgcctgcaaatgatgcctcctcctttcttgagtctgatatgacaaaggtgataccccgacaatacggctgaaagcagagtagaaagcacttttcgaagcaaagccacaactgcaaggcagctcagtcagcgcacaacgtcgggaacagagaagttctttggcatattccacacgatacgtgttcacaagttccttcaaattacaaccgaagtatttgttcaccacattgctcagataggtctggtttgtttcaagcagtgcactcagtttcttcagagaaagcgaggtgtcaagaaatacctgacgtatctcaagctggtacaatatacctttatatatattacaatccaccttgcgaatgtctgtttcctttccggcaaactcctctttccattgccgctcggcagccttgaaaagcaaagtcttctgtcgctcggaagtagcggtcgtgcgtttacgtctcagaaatagatattccatctgctttatgttgttttcatttaattataccgcttcaaagaccagatatattccatatataaaaaggtcttaaaaacgacatttttgtagatctcttgataagagatctacaaaatgtattaacacacattatatcaacatattacagagctgttgaaacgaaataaagaagaatataaataaatgagagaactatttttttatataaattcctattttttttgccaaaaatgtattagttctcaaaactttgcttatttttgcacagaaaatatatatctcttatcaagagatatataaatcggttcatgtaaaagcgaagcataacaaactgaaaaacagaagatttcctcttataaagagttcatgttagctttaaaagaagaaaagttcatccttttaactttttttatttcatcaaagagaaaaccgccaaccagtttttttaaaaagttctactataaaagtccgggagcatttgggattattgtggaaataacaatagatcgggccctgttgcataaaccttttctatctcctgattaaacctttttatacgaatgtattctatctccatagcctttggagttatctcccaagactatggagtcaactccaaaggcttgcggagataaaacaggcaggaagaaaacccttaaccatacggcgggaaagggttagagatatggataagatcttttaaggatgaagctgactacaaggctacgcattccttacgtagggaggaaaaatccccagacagccttcttttaaaaaaagcgaaacagcatatgggcaggaagatatacatctgactacatgtatggtatatagcaacaagtcgaaatgctaaagtgagggcatatatgcaatcccaatccttacttttgcctgccatacaaaccatacataaaattacgaacgctcgtacagggtatcacaaacaatcgcatgaaataaatccccactaaatttctgctggccccaaagccggacaagccctcatttcagcaggctgaaggtaagcgtctccgcgattctatcttgtcgcccttttttcattcttatatttttgccatatataaaaatgaggcattatggatttagcagaaaatcgatttggaaaaacctggaaacatttccttgaagtattgaaagtagactacaattgttctttagccgatgtttgccgtgatcagcataccactcttggaggtatgagttcctggatgtccagacggggttatagcgttaaacaagccaaggcggatgtggtccgtgattattatggcggcgttgaaccctcccgaccgacaacttcctctccttcgttcactcaaatagcccccgtcatgttgtcggaagaagagtttagtctttccgggatcacaatcacctttaacagcggaacgaccatttcggtcaaacgggccactcccgggggtattattaaaatgttacgcgattacgaaagaaaggagggggatccatgtattctctaacatcagccaatcgctactatctgtaccagggctttgtccgtatgaaccttggcattgacggtttattcaaaatcatacgctctcaaatgaaggagctgtcccccatttccggagatatatttttattctttggcaaaaaccggcagagtgtaaaaatactgcgttgggatggtgatggctttctcctgtactacaagcgtctggaaggtggaagttttgagttgccgacatttaacccccatacaggcaattatgagatctcttatcaggttttgtcttttatcttaaatggagtgtcattgaagtctgtacggttgcgaaaacgttttaggatttaatgtaatatactgtatattaactgtttgattttaaattaccatccgattattttggccgactcattgattttttgtatctttacgccatgaaaaaggatgaggtcatagagttattgaaggagcaaatcaaggagttgcgggatgataacaacagactcctggaccagatagatgatttgataaaggaggtttcttcccttaaagaggcactccttcaaaaaggcgaatctcttggcaagcaacagcgtcttaccaaggggatcgccaaacttgtatcaaacacatccgaacagcaacaaccccctcaacctgcattgccggaggaagagcggcagaagagagaagcagaaaaagcagataagcgtaaagccagaaagaacaatggggccaaacgtgacatgcattatgagatggagcaggaggaacatgacgtttatcccgacgatcctgattttgacatcaataaagcccggctggttaccaccgctcccagaatatgtgtccgctatgaatgtgtacccatgcgcttcatcaagcacgtctacaagatacacacctacgcgcaagacggttgtctctttgagggaaaaacaccggtctcggctttcttgaattccagctatgacggctcattcattgccgggctgatggaattgcgttatatacaatcgctaccggttgaaagaatcatcaactacttcgaaagtcatggctttacgctgaagaaacctacggctcataagttgatggaaaaagcctcaagcctctttgaaaatctttataagtgtatccggcagacagctttgagtgatccttataaggcagccgacgaaacctattacaaaatactcgtcccggaaaagaacagcaagggaaaaggagtccgcaagggatacctctgggtggttgtgggcataaacaccaggatgatatacctgctctatgatgacggctcccgctctgaaaaagttattcttaacgaattaggcggttgcaaaggtatcatacaaagcgacggatactcaccttaccggaaactcgaaagcgatgcttatccccatatcacacgcattccgtgcctgcaacatataaaacggaaatttatagattgcggtgaggatgacccggatgcaaaaagaatcgtggagatgataaacacactttatcaaaatgaacataagcataagatcggggttgacggatggacggtagaacagaatcttgtccatcggaaaaagtatgcgccggacatactcggagaaataaaagatgtgcttgatgatatagaagaacggggagatttgttgcctaagagcgaactgaaggaagctatcacctatcttcgcaatgagtggaatgccgtggtggacatctttaattatggtgacacttacctggacaacaatatagttgaacggatgaaccgctacatatccttatcaagaaaaaactcattgttcttcggcagccataagggagccgaacggggcgccatactatacacgatagcacttacttgtaggatgaataaagtgaatctgtttgagtatctcacggatatcataaacagaactgccgaatggcaaccgaatacaccactggaaaaatacaggcaactgcttcctgacagatgggaaaaggctaatgactaaaaagggatcattagactttttacttttaatatactatatagaatcgcggagacgcttacggctgaaggatttatatccggatgaaggaaatcattataaccaactgattaacaataaattatcttaaaatgaaggatttgaaggaaaaaaaacaggttatagagccaaatcttctctataacctgcatatactcaaatcaccttgaaacattcagagagtgatatctttcattatcttttctaatgctccggcattatggttcacataatttccggcagctttccctgcttgttgcaaataagcctcatccgacaggaatttgtccatcaaccgtttaaaatcatcataaccggttacttcaaaaccgcctttctgctccaacaaatgttgcgcctcgcggaatttcttgttgttaggtccgaatatcacaggaataccatatacagccgcttccagcacattatgaattccaactccaaagccacccccaatatacgaaatctcaccatatcggtaaatggaggacagcagtccgtaacagtcgataatcaaacaatcggcctgtgtcacattttcttccgtagcctcggtatagcggatgcacggacgtttcaccttatctaaaatctccttcaaatgactgtcgctcaccacatgaggagcaataaccagcttcatctcaggatgctcattgaaatacttgataaaaatatcctcatccggtccccatgagctgcctgcaacaaaagtcaacgaatcacctttgaacttctccaccagcggaagctgcttggcttgatggcagatatccagcacgcggtcaaaacgagtatcgcccacaactgtcacatcggtcacgccaattgtcgccagcaattctttggaaacttcgttctgtacaaacaaatgagcaaaagtcctcagcacctcactatatctcttcccataccaacggaaaaaaatctgattgggacggaaaatggaagatacgctataggtgggaatacctctcctatgcaactcattcaagtaattctgccaaaattcgtacttgataaaaaataccatacagggattagccaattctacaaaccgacggacattacgcggagtgtcgaaaggcagatagcagacaaggtctgccccctggtagttctttctcacttcataccctgagggagaaaagaaagtctgcaatattttatattcgggatgctccttacggatacgttctatcaaagggcgtccctgttcgaactcccccaatgaagctgcatgaaaccaaatataacgggcatttttgtctatcttgttacgcaagatatcaaatacttcccggtgtcctttcaccattttggcgggcttggcgctgaacaggccggcaaccttcaccccgaatagataaatatagatgactaggttataaatcataactaccggctattacttgagcacttccacagcccgacgaatgcgtcgcaatgtttcttctttccctaaaacggctgaaatatcaaacatatgcgggcctttaccttcgcctaccaaggttaaacggaaagcattcattatattacccaagtgataacctttatcttctatccatttcatgaccacagcctcctgattctccagcgagaagtcgtccaaggcctccaatacgtccgccaactccagcatacgttcgggagagtcctctttccaacgttttttacgggtcttctcatcatattccgtaggagcgacgaagaagaatttgcaagtttcccacaaatccttgataaaacttacacgatctttcatcaagcctaccacggtcaccactttatccataggagcttcaatgccatgctctttcaagatcggcatgaaaagcccggctacttcctcattgcttttcttcaatatatattcatggttaaaccattttcctttttcaaagtcgaattttgccccggctttgctgcaacggtgcaggtcaaaaagcttcaccagttcatccaaggacatcagttcctggtcatttcccggattccatcccaacagggcaaggaaattgataacagcttcgggcaggtaacccgactcacgataaccggaagacacctcaccggtcttggggtcgtgccattccaacgggaaaacagggaagccaagacggtcaccatcacgcttgctcagtttaccgttaccatccggtttcaacaacaagggaagatgtgcgaactcgggcatggtatccgcccagccgaaagcccggtacagcaggacatgcaacggagcggaaggcaaccattcctcaccacggattacatgggaaacttccatcaaatggtcgtccacaatgtttgccaaatgataagtaggcagttcatccgccgatttatataaaactttatcatccaaaatggaagaattgatcactacctcgccacggataatatcatgtacgtgtacatcttcattcggttcaatcttgaaacgtaccacatattgcttcccatcggcaatcagtgcatccacttcttctttcggcagagtcaaagagttacgcatagacatacgggtagaagcatcgtactggaaattagagatttcctgacgtttggcgtccaactccgccggagtatcgaaagcaatatacgccttaccgctgtcaagcaacacctgtacatatttcttataaatatcacgacgttcagactgacggtaggggccgtagttaccaccaaagctgactccttcgtcgaagtttatccccaaccacttaaacgactcaatgatatattcttccgcacccggaacaaagcgatttgagtcggtatcttctatacggaaaattaaatctccaccatgctggcgagcaaacagatagttatacaaggctgtgcgcacaccgccgatatgcaacgctcccgtcgggctcggagcaaaacgaactcttacttttctttctgacattgttgttttatataaaatacgccgcaaaattaatctaaatttcccgattttttcgtattttgcgcgcaaaaatatacgattatgagaagtttcaagaccaaccaacggttttcatataaaaatttgatttataaaagccttattttcattgccacagtatcagtgatagtctactttttacccaatgaaggaaagttcaactatcaatttgatataaacaagccttggaaatacggactgttacaggcatcatttgattttccgatttacaaaaacgacatacaagtacaaaaggaacaggacagcatcctggcagactatcaaccttatttccagatagacaaggaagccgaaaaaaatgtcctttccaaattaagggaggattacaacaagaccttacgccattcactgccgggcacagactatgtacgttatattgaacgcacattaaaggcactgtatgaggacggaatcattgccggaaatgacttgaagcgtatggaggaagacagtatcattgccatacggctggtagacaagaatgtagcgacaagccgttttatcgaccaattgtacaccgtgaaggaagcctatgaatatttgctgaatgcggataccacccactacaaaaagaagatattacaacaatgtaatctgaatgattacattacacctaatctggtttatgatgaagaaaagtccgaggcggcgcaaaaagacctgctctctaatatttcatgggcaaacggctttgtgctgaacggacaaaagattattgaccgtggagaaattgttgatgagcagacttacaacatattggaatccttacgcaaggaatgggaaaaacgtagcgactcggtacaagagaaaagactgacattggccggacaaatattatatgtaggaatcttcctgttctgcttcatggcctatctggagttgttccgggcagattattatgaacggaaaggaacactcaccctgctatttgcgctgattgtgttcttccccgtcctgtcttccattatggtggaacagaacttgtcaagtatttacgtggttccatttgccatgattccgattatagtccgtgttttccttgactcaagaacggcattcatggcacatgtcactatcattttgctttgctccatcactttacgttttccacatgagtttatcttgttacaggtagtggcaggaatggtggcgatctatagtttgagagaattgtcccaacggtcgcaattgttacggacggctttggttgtatttatcagttacgctttattatattttgctttcgagctgattcatgaagatgatttgaccaagctgaatacgcgcatgtacatctattttatgatcaacggtatcttactgctgttcgcttatccgttactgttccttttggagaaaatattcggttttacttcagatgtgactttggtggaactgtcaaatatcaacaatagcttgcttcgggaaatgtccgaagtagctccgggcactttccaacactcattgcagatggcaaacctggctgctgcggcggcaaacaagattggaggtaaaagccagctggtgcgtacgggagcattatatcatgacatcggtaaaatggtgaatccggcttttttcacagaaaaccagtcgggagtcaacccgcacaagagtttaagttatgaacaaagcgcccaggttatcatcagtcatatcaccgacgggctgaaactggcggaaaagcataatctgcccaaagtgatcaaagactttatcagtacccatcatggacggggactgacgaagtatttctacatttcatataaaaacgaacatcctgacgaagaagtggatcaggaaaagttccgctaccccggtccgaacccgttcaccaaggaacaggccgtcctgatgatggccgactctgtagaagcggcttcacgcagcctgccggagtacacggaagaaagcatcagcacactggtagataagattattgacacacaggtatctgaggggtatttcaaagaatgccctattacgttcaaggatatagcaacagtcaaagcactgtttaaagaaaagctgaaaacgatgtatcacacccgaatcagttacccggaactaaggaagtaagcaatcctgcacaagcatcttccagtatatcaagcacgttctcgaacccttgcgcaccgccatagtaagggtcgggaacatagtctgccactttggtgcggcaataatccgtcatgcgatggattttcttttccgtttccagatcgggagcacgctccatcaggtcctctatattacggtcgtccatgccgatgatcatatcaaaatgatagaaatcctccgtacagacaggacgggaacgatgggtcagattgtaaccgcggcgggaagcatgcatccgcatacggctgtcgggcaattcccctctatgataactcaggattccggcagaatccacctctatctcgtgttccagtccttttttctttatgagagtacgcatcacttcttctgccgaagaagacctgcaaatgttaccgaggcagacaaaaagtattcttttcatatataatctacaaatgaaggtattctttaaatgatttcacatcacggttcatgatcagctcttcaggaaacccggtaagctgcaacaattcatacaaattatcgtaacgggctatatcaaacgaaatatgcgcgtcacttcccaaaatgaccggaacttcatatttcttgcataaacggagaatggtgaggttgttctcacgggcattgggtttgttacgggtgggttttaaagaactgttatttatttccaataaagtatggtgttctttggctgccaataccatcggttcaaaatgtaacgccgccgtaccgtctccggggtgactgataatatgaataaaaggattgctgataacctgtaccattccatgggtgttttcttctatcgttccatattcataacataaagagtggatacccgcaatacggatatcaagcatcttcatataatcctcgtccaaatcgaggtttcctttaccatccagaatattaatctcagcccccaacaacagctccaccccatacatccggcggggaaccacatgcaagtttctaaaataaataggatggcaagtaccgggaacaccgggcgaatgttccgttatccctaaaaccttcaatcccttatcggcggcagcttgcgccatttcttgtaaagtactgaatgcatgcccgctggcaatggtatgggtatgtacgtctaattctatcttcatctttattttcgtttatcttttctattatcgtccagtgcatggaccggttactgtggatctacatcataataaactaacaacgaacggaaacgttcatcttccaatatggcacgttgtacggcaagcagataatcacgcactttctttatagaagcattctgctccactttcacaatcattttttttataaataaggtctggatacgggccaccggcggtttgtccgggcccaataccctgtcgcccaatccggaacggagctgtgccgccatggtatccgccgccaaatccagaatatcctctttgcggtgtttcagatatacataaatcaaacgataataaggaggatatttgaacatctgccgttctgccaattggtcataatataactgctcatagtcattatgcatcacttgatgaataacgggtaaatcgggcgatttggtctgaaggataaccagtccttgcttatttttacgcccggcacgtcctgctacttgggccatcagttggaaagcacgctcatagctccggaaatccgggaagttcaacatcgtatccgcattcagaatccccaccacactgacatgatcaaagtccaatcctttggacaccatctgcgtaccaatcaggatatcggtcttgccctgttcaaaatccgcgataattttctcgtatgcggtacgggtacgggtggtatccaaatccatccgggcgactttcgcctcgggaaatatcagttttatatcatcttctatacgctctgtaccgaaaccgcgatgcatcaattccactccgccgcacgccgggcaggaacggggaacttgataggtatatccacagtaatggcaagtcagctggttcagccccttatgatacgtcagactcacatcacagttcttgcatttaggaacccagccgcaggtatgacattctatcatcggagcgaaaccgcgacggttctgaaacaggataacctgctccttacactccaatgcctcttttatctgcttgaccagcgccggtgagaaagggccctgcatccgcttctgatgcgccagttccttgatgtcaaccagttctatatgaggaagccggatatctttatatctttctttcaattctaccaagccatactttcccgaggtagcattaaagtaagtttccacaccaggagtagccgtccccagcagcactttcgccttgaacatagaggccagcatgatggctgagctacgggcatggtaacgtggggcagggtcttgctgtttatacgtattctcgtgttcctcatctatgatgaccagccccaagttacgaaaaggcagaaaaatagaggaacgaactccgagaatcacatcatagctcttctctcccaactgtttctgccatatctccacccgctcagcgtccggaaacttggaatgataaatacccagccgatgtccgaacactcttttcaaacgctcagttatctgagtggtcagtgcaatttccggaagcaaatataagacctgctttcctgttttcagcacctcctgaatgaggtggatataaatttccgtcttgccactggatgtaacgccatgcagaagacacacatttttctctctgaagcattgaagaatgttgccataagcctgttgctgcgcaatattcagcggattaatatcaccggtatccgaaattcctttatccaaacgtcctatctcctgatgatagacctcaaagactttcttttcgaccaatccgttaaaaacggccgcagaccctccagacttttcaagcagctctttctttgttacttcctttaaagcataccctctggctacccaaccggacaattccacatacttcattaatatcatcaattgtttaggagcacgtgacaattcattgaacagccgttgtaagtaagcctcatccgcttctccgttcaccaacctcacccttgcctctgtacgcggtttgtaattacgtttcagttcctccttgacaaagatggcctctttgtccaacaaagacttgatgacagtcaacacatttttcagtccgctgtttttttccaactgggttacacactgttctgtatcccggctcaacaaatccagaattttctgctctttctccggtaagggtgcagtggcttcaaaatcgggattatattccaccaacgtttcgctttccagtttcatacccgaagggatagccgccttgtacacatctcctaatgtacaaagataatattccgccagccattgccagaactcatattgtttcggtaacagtaccggagatgaatccagcacttcagctatatccttcgtttcatacccctccggggccgcataatgtacatttgtcactattgccgtatagaactttttctttccaaacggaacaaccacccgacaaccaatctgtaccatctcttccatctcctgaggaagggaataagtgtattggttggcaataggtaatggaactatgacatctacgaattttttcatggtgcaaaattacaaaaaaggaggcattcagtgaagaatgcctcctttttatcttttattaaataaggttgtctagaacaagtatgccaaagaaacttgccaagtgttgttctttatattaacagaatggtgtccatcacccgatccaccctctgtataatattcataagtaccagtcttgctcagagcaaaattataattaacccctaactgtaaatgacgtatcaatttaagacctgctcctacattgaaactggttgtagattttttcaatgacaattcacgcgtccatgttttattgccaatattaaaatcaaactggggacctgcagcaatataagcacccaacatgctaccaaggccaaaggaccatttcaaattcacaggaactgcaaatgtctttaacttcattgttttctctccatcgacccctaagtctgtctgagaatataaagcggcaacatctgcccctatcccgataataggcagggtgaattcagccatcggacccacaaaaaaaccagtcttattatcccctttaaaagcatcctttgaaaaactcaattttgaaatattcaaaccaccttttactccaaagtgcaactgagcctgagcaggagcagccatcatcaaacatacagctaccattaatacactaataatctttttcatgtttgtctatttttagtttacgccacaaagataaacactttttccatgtataatgttcaatctcccaggaaagttacattacgctttccaatccccccttccaagaagaaatatcaaacaaaaaacggacagaattttttattctgtccgccatgttctctttctaatattcttcctcattaaaaaagaaatcctctttgctcggataatccggccaaatatcttctatactttcatagatttcgccttcatcttccatctcttgcaagttttcgattacttccaacggagcgcccgaacgcattgcatagtcaatcaactcatcctttgtagcaggccagggagcatcctctaacttcgaggccaattctaatgtccagtacatagttttcttattttttaagtaaatacttttctttcgttctctaattagccgcaaaagtataataaattatttcatttgcaacttttatcccaaaaaatttcatccgttttagttaaatgatttaactttcgggtcaaaatgaataaataatcagataaacggttgacaaatgctgttacacgggcatctatgtcacattcttcagccaatgcaagaatgcgtcgctcggcacggcgacacaccgtccggcaaatgtgtccaacggctgctccacggtcaccccccggcagaataaaagcattcaaaggaggaagttcattgtcaattacgtcaattgcctgctccaacatccggatgtcttcatcctctatacgactttccatacgcaacttggtctgtgtctgatccgttgccagatacgaaccgacagagaataatttattttgtatacgaaaaatgatttgtttatcctcctcatccgtcaaatacgtttgcaacaatcccaaataggagttcaattcatccactgtgccataggcttcaagccgtatatgcgttttcggcacccgggtaccacctaccaatgatgtggttcccttatcacctgttttggtgtatatcatgcttttcttcatggttccggttataaaaaatttacaatataatgctgtttatatctcgctttatcaaaaaagaccaaccctatgtcatacaaatcaaaagtgatacccgtcgactcactggctacaatttgctcccaccatttccgtttttccttcgattcatgaattcctccgacaataaagcaactacgaggtccggcataaggaagtaccagttcaaaaacttctttataaaaaggagtatgccctatatgcagacaatctaatgtatgcacctccgccagtttctcctccagttgccgggaagtctttgcccaatccctgcctttcaaggtgacggagtccatagtatgacacgcagcccgcatatatcctatggatgccccattaccaatccccacttcaatcaacgactttggtctgaaataattaaccaaccggaatagcaaacggttcactttccttcgataatgtggcaaataagcaggaaatcccctttccttcaatacccgataagcatagtagtgatatttttcataaacaacagaagtaatcagaaaaaaatcagacggagagtgtactccgtaaccacaacggtgacggaagcgactgcaccaattccatatacgatgaagaaaaaacatatttctcagctttattaagtaacacaaagataaaagattacccgacaatatcgaaataaaatactatttttgttgcccattagttattaaaccatttataaacgatgaaacacacactctcttttatggtatgggcaatactggctgtcttattgcctttacaaatggcccaggccgcagctcctcccactgaattacagaaaagacttcaaaatcttccggacatcagtgacattaaaccaatgcaaagtgatgcctatccggagaaatatgtattcttcattaatcaactattggatccgcatcaccccgaagcagggaatttcaagcaaagggttattctctcgcatgtaggttttgaccgccctaccgtactggttaccgaaggctatgccgcccattatgccacccatccgcgttatcaagaagagttatccaaattattcaacgccaatctggtattcgtggaataccgttattttggtgagtccatgccgaagccctgcaactgggattatctcacggttgaaaattcactgtatgatttgcatcatgtaaccacgaccttgaaacaactatacgatgagaaatggatagctaccggaatcagcaaaggcggacagactacgatgttctaccgcacttactttcccgatgatgtggatatctccgtaccttacgtagcccccctcaaccaatcattggaggacggtcgtcacgaaccgttcattgccaataaagtttcgactcccgaaaaccgtaaacgagttgaaaactttcaactggaagtacttaaacgcaagagccggctgctaccgatgttcgaaaaatattgctcggataaaggatataccttccgcattcctatagccgaagtatacgacttcaatgtattggaatactcatttgccctatggcaatggggaactcctgtaaataagattccggaaacaaatgccgatgaccacacgctattcaagcatttcatagctatttgtgaaccggattatttctccgaacaatctccctacccttcctttaatgtgcaagcggccaaagaactggggtattacggatatgacatcaaacctttcaaaaagtatctgacgataaagagcagccgtgactatcttcataaggtaatgttaccgcccgaactgtcaaatctcaaatttgacaagacactatataataaggtggtaaaattcctgaaagagaatgatcccgaaatgatctatatttatggcggcgatgatccttggacagcttcgggtgtcacttggctgaagaacaagaaaaacataaaagtttatgtattacccggcggcagccataccacccgtatcggcagctttgacaccgacacacaagaagaaatcaagacacaaatcaatgcatggctgaataaagaatagcaaagagacgagataaaaagcttttccgccacaggttacgcagattgtcaccggttatttccattgaggacccactgcttaaattggaccgatgtcaatctgatcaatctgtgacggaatcttgattttatcataaaggcatattgccatgtttcttaggcggattgctttggtttttattgtgacacatttccaaagcttgaataagtttgtaacgagtgtcacggggcataatcacctcatcaatcagaccacgttctgccgcacgataaggattggagaatttatcttcgtattccttgatgatctcagctttctcttccggagcagacttgcggtaaaggatattcactgccccttctgcacccatgacggctatttccgcctgtgggtaagccaggttcacatcggctcccgtcggcttgctggacatgacaatgtaggcacctccataagctttacgggtaattaaagtaaccttgggcactgtagcttcagcgtatgcatagactatcttcgcaccgtggcggatgatgccgttgtgttcctgtaccgttccgggcaggaagccgggaacatcctcgaaagtgatcagaggaatattaaagcagtcacagaaacggataaaacgggcagccttgtcgctggcgtcaatgtcaaggacgccggccagccaggcgggctgattggcaacaatacctacggaacgacctcccaggcgaccaaaccccaccaccacatttttagcaaagtgaggcatcacctcgaagaaatactggttatccagcaccggttcgatgatatcctttatatcataaggcatgttcggatcttcaggaatgacagtctgcaacgcctccacctgacgatggatgtcatcgttgcagggaaccagcggcgcatcctccatattgttggaaggcaggaaactcagcaattcgcggatactcatcagcgtttcctcctcattatcgcacataaaatgggtcacaccgcttttgccgctgtgagtctgggcaccacccagttcctccttgcccacctcctcgttagtcacggtcttcaccacatccggacccgtgataaacatgtggctctgctccttcaccataaagataaagtcggtcagtgccggggaatagcaggcgcctccggcacaaggtcccagaatagcggaaatctgggggataacacctgatgcaatggtattctgataaaagatggaggcatatccggccaagctgttcaccccttcctgtatgcgtgccccccccgaatcgttcaaagcgataacgggagctcccgtcttcaaagccagttgctgaacctttacaatcttggccgcattggtttcgctcagcgaaccgccgtgcgcggtgaaatcgtatgcatagacaaacaccggacggccgtctatctttccgtaaccggtgaccataccatctccggcaatctgcttcttctccatgccgaagttggtacaacggtgattcaccagcttgtccagttcattgaacgtacctttgtccagcaacattccgatacgctcgcgagcggtcatcttcccttgggcgtgttgtttctcgatcttgtccacaccgccgcccagcgacgcgcgtttgtccagctcttcaaaccggctgtatatttcttctcttgtcatgatcaatcttcttttattatatccaatactattaatacctggttagcattgacggaatccccctcattgactaggatatcccttaccgtacagtccgaggtcactttgtagttgctctgcatcttcatggcctccagcactaccacaatatccccggatgacagacggtcacctttccggacgggaattttcacaacctttccgggcatgggagccacaatcttgtcatcctgtctctcctcgccgccctttttcatacgcagatacttggtctgggtgtccactatgtccacatgataggaacggtagaacatattcacatcataactctttccaccctccccacggatcagttcggcattgaaggaattgccatcgtgcaggatggaacagcttccgttctcggccataacgatatccacatcatacggttttccgtcaatcataaactgtaccttgtttccttccttgctcaccaacgtcacatcggctacgcggtctccaatatgtatttccatacttttgcttaattaaatgaagaatcagattctcaacactcctttctgcaagccgaactcacgccagcggctgatgggacgggcatcagacagctggggactcttgttctcttccagattcatcagatagtcaatataagaggcgatcatggccatgttttcaatctcctcattgttgccgttgccacggagcagcatacgggagttcttctctataaataaggtattatactcacccttcacaaagtcgggggtatgcatgatgcgtttcagataactgaggttggtcttcaagcccgtaatcttgtactcgtaaagcacacggcgcatacgctctatggcatactggcgggttgtggcccacacgatcaacttgcctatcatcgggtcgtaaaagacaggaatctcgtacccttcgtacacgtagctgtcaatgcgtacgccgatgccgttaggctccgtcagctgtttgatgatacccggcgaaggcatgaagttgttctccgtgtcttccgcacagatacgacattcgatggcatgaccgcgctgatacagctcttcctgtttcaaatgcagcacttcatcattggcaatgcggatctgctctttcaccaagtccacgcccaccacttcttcggtaatgggatgctccacctggagacgggtgttcatctccagaaaatagaaattacggttcttgtccaccagaaactcgatagttccggctcccgaatagttcactgccctagcagcagccaccgccttttcccccatctcctgacggagttccggagtaaggaacggagacggactctcctctacaatcttttggttgcgacgctgaacagaacactcgcggtcaaacagatggattacattgccatgattgtcacccagtatttgaaattctatatgatggggttcctccacaaatttttccagataaaccgtatcatccccgaaagaagacatggactcggaacgggcggtgttatatgcctccaccacttcatcttcactgtgtatcagcctcatccctttaccgccgcctcccatagaagccttcaacatgacaggatagcctatttcattacagatacgtaccgcctcttcggcactttgcaacggctgttccgtaccggggaccacgggaacacctgcggcaatcatacgcttacgggcggcaatcttgtcacccatcgcttccatcgtctcggcggcagggccgataaagatgatcccctcctctttgcaccggcgggcaaaatcagcattctcggacaaaaaaccataaccgggatgaatggcatcggcatgatgttgccttgcagctttaatgatattatctatattcagataactttctttggaagcggcaggccctatcagacaggcttcgtctgcatacatcacatgacgcgccgtacggtcggcttccgagaaaacagccacagtgcggatacccatctctttgcaagagcgcataacgcgcacggctatctcgccacggttggcaattagaaccttttgtatcataatctttctctttttacccgaaatgtcacacaaaattacagatgcattcattatacatgaacacatcttacatgggtggcatctctcattagtattgattatttaacgaaaactccctgttttttagaagtgggagccataattggctgcaaagatacttgttttttgcacaaaaactacaaatgtgtgtctaaataatgtttcaatacattggcatgatttcgctcctgttctttcgaagcgtaaagtaatgttactttcgaataagcttttatcttatcaatgaacgctttagcggcatccgattctttcaattctttttgatacatatctgcaaaagccccccatcttttttctatatccgcatgaaaccatttccttaaatcattggatggagtgacctcttttgcccaataatcgtatttcaaatattcccgcttcatgccacggggccacaggcgatctaccaaaacacgatagccgtcttgttcagaaggttcatcataaaccctcttgatgtttacttgagtcatagttggttattttaatttaggtacaagcttataactccatataaccctaaaaagttcattccggacagtggtttcaggataacagcaactcgtaatccactacatccaaccatcgtccgaatttcagtcctaccttcttaaaatgggaaacttttttaaatcccagcctcaaatgcaaagcatcactgacaacatttccctctgtgacacaggctatcagtgcacgatacccgtccctacgacattcttcaatcaatctttccatcaactccctgcctatgcccttcccctcgtatccgggagctaaatagaccgttgtttccaacgtatgcctgtaagcagccctctccttccacaaatgggcataacaataacccactactttcccttcttcctcatacacaaaatagggaaaacggacggcaattccggcaatacggttacgcatatcctcctctctcaaaggttccgtttcaaatgtagccacactgtgcctgacatattcattgtatatcgttgtgatggctttggcatcctgaagttccactcgtctaatcataatgtcatatctattattaaaacgtaagcaagatataaaaaaataatcagttatctagagaataatcactatatttacagccgattctaatttcagctataaaaatgacagaaatagtagaagtaaaagactttatcccagcctacaccgatgcagtacaaaaactgctggagcagctcacaaaccgcccggtaaaactgaccgggacaaccctcagagagatcatatcccaagaaaacacccatctgtttttcttactggctgatcaggaaattgcgggaatgctgactgtaggcatctatcacagccccacaggcggcaaagcgtggattgaagatgtggtagtggatgaaaaataccggggacaaggactcagcaaacagctggtcacccacgctgtccggtttgtgaaggaacaaggcatacctcttattatgcttacctcaaaccccacacggatagcagccaacaagctatatcaaaaattaggcttcgaacaaaagcagaccaatgtgtacagaatgaatttagaataacccattcctatttcaatatgataacaatcagacattcattgcccaaagatttggatgcaattatagaaatattccactatgcccgtcagttcatgaaagagcatggcaaccccaaccaatggataaacggttatccttccgctgaattgattctgcgagaaataaccaacggaaccaactatgtttgcgaaaatgaaaacggagaaataataggcacattctgttttattcccggagaggaccccacttatgcccgcattgatgacggcaactggctgaacaacgaaccatattacgtcattcaccgcatggctaccaacggcaaacagaagggagtagctgacgcctgcctcaaatggtgtttcgaacattgcaacaatatccgggtagatacccaccacgacaaccttgtgatgcagaatatcctgaaaaagtacggtttccggcgttgtggcatcatttatacccacaatggcacatcccgcatcgcttaccagcggacattaaccgaaaaagagttatctttgccgaccgaataaacaagaaaaagaaacatgaagattctctggatagacctgaacagttcatatgcccattcctcattggcactgccagccctacatgcacaaatcatgacagacccttctatagaatgggaaatcgtatctgccaccatcaacgaaaatacaggaatgattgtcgatgagatctaccgccaccgacccgacatccttgccgcaaccacctggcttttcaaccatgagcaactgatgcatgtcgcttccagagtaaaagcattgctccccgaagcctgcctggtgctgggcggtccggaatttctgggagacaatgaagagttcctccgcaaaaatccatttgtggattgtgttttcagaggagaaggagaagaagtctttccacaatggttgacctgctggaaccatccggaacaatggcacaccgtgcccggactctgttacctcactcctaacaaagaatataaagacaacggtatagcccgcgtactgaatttcgccggactcgtcccgccagaacaaagccgtttctttaactggagcaagccctttgtccaactggaaacaacacgcggatgtttcaacacctgcgccttctgtgtcagcggcggtgaaaaaccggtacgcaccctttccatcgaaagcatccgcgaaaggctacaactcatccatgcacatggcatcaaaaatgtacgcgtattagaccgtacttttaattacaaccctcgaagagccaaagaactactccggctctttctggaattccatcccgatatccgcttccatctggaaatacatcccgccctgttgtcagaagagctgaaagaagaactcagcctgctgcccaaaggactgcttcatctggaagccggcatccagagcctgcgcgaacctgtacttgagaaaagccgccggatgggcaaactatctgatgcactggatggtctgagattcctatgcgccttgcccaacatggaaacccacgccgaccttattgccggactgcctctttatcaccttcatgagatatttgaagatgtccgtacccttgccggatatgctgcgggagaaatccaactggagtcactcaagctgcttcccggaaccgaaatgcgccggagggcggaagaattaggaatcaaatattcccctctgccgccatacgaagtgctacaaacccacgagatcagtgtcagtgaattgcagacagcccgccagctttcacgcttgttggacggattctacaacacaccggcatggcaggcactgacacgtgaactcattttgaatgacgaacaattcctccatcgttttcttgcatatttaacaaaagccaatctgatagaccagcccatgagtctggagaaacgaggcttgatactgtatgagttctgcaaacaaaactaccccgaataccagatacaggctgctattgcctggatagaagcaggcatgtcactgaaaaaactccctgccgagaaagtatggaccaaacgacaaatccctcctgccacttggaatatcatttatggagaatacaaagaaagccttcgtctgtgtttccttcctgccgatgaaaagggggaacatggctactggttcggctttgagtcggagatacaaaaagcaagtcctgtattcaaggcaagaacgtaaaacgttacgacatcaggagaagctgttggtttcaaaaagtaatgctcgattttgatttagtatcactttatagaagtgaagccaagcggctgaaagagcccaacaagagtaatccggataagagccaaaggaaaaggtgatttcgtcttatgtaaaacataaaattcttctgtcacaccatctctctcattaccagcaatttaccgtataaaaacatccataatgtccctgaaccggtatgtaggcaatggagatggaaacattcgcccattatttgtataagagccgcagatatcagattggatctgacaggacatgccgtgctttcatttaatttaataggatgtcattgcgttaacttccgatatatactgttgcctcacctatgtgaagcagtgattccactttagtgacaacggatattcacacagatgaaaagcccttttcacccaagtgaaatatcgggtacaagccatagaaatcataggaaaacaaaagaatttattttccttattatcaactatttgcatatttcctatattctccatttttccctattttgcccgtttcctattattcagtacgcttttagtacactttgaaatctcattttcttttgtacctttgtaatatcaggaaataaaagaaaatcaactatttagtataattacctggctacagtacctaaatcgggataaaacctctaaacaatgggaaaagttaagacgaagtttacgacagtcagaggaggagccaagaaaaaatagagggctcagaatataaactaaaaagtacagaccatttttattatggtctgtactttttataactttgcaatactaaatcagaacatcaattatgcaacaaaatattataagcaatttctttcgccctataaatacggacatacagataccagatagcgagtatgcaaaaaccgatgtatgtattgtcatggctgatgctttggcccgcaataccaatcatagcctatatatcatagactatcaccgcaagaatttcctttacgtatcgtccaacccgctttttctctgcggtcattcaccggaagaagtgcaacaaaaaggttatgccttctactttgaggttgttccgtctgacgagataaaccgtcttatggaaatcaacgaagctggattccggttctactatgaccagcctatagaaaaaaggcttgacttgtctatcgaatataactttcatatccacacatcagaaaagcatccgcaccttatccaccacaaactaacacccgttttgctaagtggcaagggagatatatggctggctctatgtacagtttcactttcaccggagaaaaacatcggagatgtagtcatatcagaccatacatgtactgaccactatatctattcattcgagggcagacgatggagaaaacagccggaactaattctttccgaccgtgaaaaagagattctccagctctccgtcaaaggactgtcgaacactgagattggagaaactctctttattgatgccaataccgtcaagtttcacaagaagaaaatcttcgagaagctacacgcagaaaacatcactgaggccgtgggtatcgcagccaatctgaggttgatttaggaacacaatgtagaactttggcaaagtagctataggaggatgtgagaatatgtattcctccattttcttccgtccaagttcgatgaccttttcatcgttacatctgttcatcttttctttatcaataaaggcaatatgccagaagaccagataaccgattacatacctttcgatggtaacttctatcggttcgtccggacgcttcatggattgaaggccgttgcggacgtccttgtcgatgatgcccacaactgcccatgagagatttatataggaaattgatgctgtcataatttacatacggtttattgtatcctgtcctgctcccgtacctttatacttgcttttggctgcattaaacttgtagcgcactgtaagactgaacgagcgtgtatcactccaagacaaatccttcatttgtgcactctccatataaagaagtgcttcctgcttacaacctaacaacaagtcatttgcacgcgcttctatacttagggcatcattaaaaagggatttgcgtaagcctatgttcaaagtatattgtggacgtttaagggtgatattctgaacctgaccacgactttgataattaaaatcagcagagagaaggaatcctgcaggaagagtaaaagtattgtttaaggaacctacaaaaagtggattgttataggtccttctctgaccggcggcatccaacgagaaccactgcttcatcacaattgcgctggcattaagattccatataccaatagtaggcgaagctgccagcattactgtcagactcggtaaacggtcgtgattgatatagtttattaaagtagtagccgactgattttccacctgtgttccccaataaaggatatagtcccgaagcactttgtagcttaccattgcctgaaagaaccgccatacaccaacagcggttatatcatgcgtaacacttggttttaggagtggatttcccgtttgccatgtaaacctattggcataagtgatattatttcttaactgactgtagttgggacgctgtgtttttgcagcatagctgacttggaattgtactttccccaattgcccgttcacagaaatatttggaaagatattatcatatacacggctttgtccgggtacaaatgtagcattttcaaaataatcaaaatccacatgctcatatcgcaagccaatgtttgcctgaccgaatggtaaaggatggctgtactgtgcatagccggcaagattctgttcacggatgcgggtataggttgtaggtacatatccttcctgatttacataatcatcatgccggttggtataggtatattctcctcccacagagatacttcctccccataagggatgagtgtatgaaactttggtggcagtaagttgattttccaccctgttatcagaagtgacagtacggtcttcatggtcctgactattctccatattaatggtatattgcgtgtatgtattgctgtaatagtctgcatcccaggtaagttctcctttgcctatttgtcctgcatagtaaatattaagctgatgttccggttgtgattttgcatcggcagcaatggtagtatataaaatatcgtaaggcaatccatctgcctgaatctcgctatcgaaggcggtaaacatatctgtatgcagggcattgctcaaatcataacgtacacctatggaatgatactcattaaaatcataattgaatccgatgcgtccgtctatactgcgagaatcggtattagagtgctgataattcttttgcgtccatatggtatcggtaaaggccgtttgctccagaatatcgttttgcaaggaggtagttttatcaaaacggaccatagcgaaaacatcaagaccgttatgccgatagtttacatcggcttgctctacaaagtctgaattttgagattgatcataggaacttcgcaaactcactccaaatccatctccttgtcgtttgacagtacggatacgaacaactgcccctaccgttgcatcataacgggcaccgggattacgaacaacttctacgcttttaatttcctccgatgtcagttggtccagttcagcgatatcacgtaattttctaccgttgatatagataagcggtgaacctttacccaacacctcaaatccatcagcctttttttgtaaaccgggtatatgtgccaatacatcttcagctgttccggctttcgagagaactgtaccctgcacattggtttccagagcatcattctttatgcgtgtcacaggcaaattggcttttactaccacttctccaagcatccgtgcatccgatacgagctgcacgatacccatattggcaggagtagtcggtttatacactgtcttatatccgatagaggatattttcactatctggtttaccgatgtagcttccagcttaaacaaaccatcttcaccactgatggttccacttacaaatgccgaatccggcagagacagcagcaccacattggcatatggcaacggatggttactttcatctacaagtttccccttcacggtttgtgccgacactctcatcggcagcaacatgctcacgacaagcatgaccaaatacattttcatctttttcattgatatatcctattggcacactttgaatttgcttttctttccatttatccggagcgtcacttggggatttgagaattgcgtgacatgaggaaatgtgagtgtgacagtggccacccccttttttactgttacttctacggatgttgccggatattctttttcactccatgatgacggaatgagttttacatcagaaaccgtgtatttgtctttggcttgattgtccgtgaaaacgatggttactttgttgtcgtaattgttgaaaccttgacaacgtggctttgcattaactgtcaaacctatgacagtcaagaaaattactgttacaatataaaatacatttttcattgtacgatgtttttttgatttctgcagcaaagttccacacttccgaagacttctccactaccctgtagagtagttttgattacaggagctaaaaaaagaggagatataatacatataaagaagggagtgaataggtttacccatagtaaagactaaacctgtagttgatttttggaacgtaaaaaaaagtataaacccaatgcttgatttacacccttgcaggcggaaggacaggtatgccgtcgttccttttacctcaaaagacgaatatcagatttcccataccgacccgattcccgttttattcatttaccgtttctatcgtatcgctgcgcctttaccaccatatatattgaaccgatgattggtataagcattgtcgacacaactgacaccgctttttcgtttactgaccttgcaaccattacgaaatatgacacaatcataagcacagcaatcacgcaaagcgagcgacacatgaagttagacagtcctttgacatccacattctttttttgctcagcagtcattgtgttatagcccgctatgaggttgggatatttccttacgagcattcccaatacaaacagaacagctgctattatcaacactggtgtctccatttatatgatacttaaaacataaaactgaacactttcttttgcgaaactttaaacctttcaatctccaaagaaagcgatttcttcaactgccctgccataaacgacaaaaacggctggttggtttcttcgtcctgacattggcgtagagaaaggatatattcttccctatcctctttgaatatcttagtaggaaaaaggtgataacaaaactggatgtagttcatcagtaatcgaactgttctgccgttgccatccacccacggatgtatggttactaaattaaggtgggcattaaaactcaattcatattgttcccgaaatgctcccacggtcttttgcttctcttgcagaatcgcacaaagttcatccaccttagcaggaactttcagatagttcatgtaagaatgtccgccaacatcagccgtaacaccacataagcgaaattctcctttggaagaatcgaaagacccttgtaaagatattacctgcaaagtggatagtcagatgcttcggaaagatgtgctttcgcccgaagaagtacaaaagctgatggcttgtcattatgacaacgaaaaccctacagtcagacaagcgtttatcttttgcctatattgcggtctgcgcttctgcaatgtaaaagatcttacttttaaaaatgtggattatgctaaccgattattgaagttcgagcaaagcaaggccaaggaacattctgccagtagtggtgtggttattcctttgaatgacggtctattgtctatcattggtgaagctccgacagataagaactgtttaatattcgatttgtctacatacgaaagctgctgtaaatctgtaaagcgttgggtaaagagagctgggatagacaaacatataagctggcaccttgctcggcattcgtttgccgtgaacattttgaacaatggggcaaatatcaaaaccgtagccagccttttagggcatagcggattgaagcatacggagaaatacacccgtgcggtggataaattgaaagaggaagcaataaacagcttacccgaattaaagttttaaccacaaaagacttatctttgtaactaacgtgagttcgaaataaaatcaaaaaatagcaagttgtccgtcattgacaaactttacgtcaatggcgggcttcttttcaaaaaagcagtatgccgcgatagccgacaaggagttggctataaagttactgaatgaacgatgtcttgagtgttcaatctgtgcgatgttcttcagttcgtcattgaccgtttcaatcaaggctctttttcttagcaaaatcttgtcggcaatactcatcagtgagttcctcatattatttttaactttagtaacaagttgtatgccattaaggaaaaggttttcaaacagagcctgacctatatatcccttgtctgcacatagttttcctttgatgttttccagaaacctaccctgtttcaacggttcccggtcatccacgtttccaggcgtgaacatgaaattgaggatttcacccttgtcattgattatcagatgcagcttgaatccgaagaaccatcccatagaacatcttccacgctcggcaagcccttcaaatgtcttatgaatcaagattctttggttacgacatacacataagggagtggaatcaacgaaactgatgccggtacaagttcccagcagtactcttttgatgaatatggtcatgggaagcaatacttccttctccagttccacaaaacggttataagaaacctgacgaggaaaaaggtgtttcagatgtttacagacatactccttgtagtaatgcttgaaacaacggaaaccaccggagtgaaacaggattagaataaccataatctctgcatcactcatacggttgggtttgttacgatgcatggtcttcatatccttaatcatatatttttcctgttgcaatgtaaattccttgcaaaaatcatcggccatacaataaatctctgtaactttagactctggaaacatagtggtaatcgtttaaatgttataattcagcactataaatttaatacttttatcgctatgtttctaattataagtgaaatatatttattcttatttcgaactcacgttaactatgaactttgaagcattagtaaaacatatcagcacgatacagaacacgttgcaggcacaagccgcacacgctgtaaaccttgcccttacttcccgtaactggcttatgggttgctatatcgtggagttcgaacagaacggagaagaccgtgccgcatacggtgaacaattgttgaagaagctggaacaacgactgaaaacaaaagcctgaatgaacgaagattccgagaggttagacggctgtaccttgtttatccacaactgaaagaacctatcacacaatacattgcatcacaaatccaaattcggcacacattgagtgccgaattcatagaaccaattcggcggttgccatccgccgaatctgcaatgaacattcggcggataccgtccgccgaattgggaactgcaaaagaatggataattccggcagatagactctttaataaactcacatattctaatttaatgctcatctccgctattgacaaccctgtaaaacgagctttttatgaaatggaaaccattcgtggctgttggtcatataaggagttagaacgacaaatagcatctttatattatgaacgtagtggactctccaaaaacaaagaagccctctccgctttagtccagcaacaagcgaccttattacagcctaaagatgttatcaacacccctgttactttagagttcttaggattaaacgagcatgccttagtaacagaaaacgacttggagcaatccattcttgacaacctgcaacacttcctgctggaaatggggcatggattctgctttgaaacccgacaaaaacgtatcttgattgatgaggattatttctttaccgacctcgtattctatcaccgcatcttgaaatgtcatgttattgtggaattgaagatagacaagttccgccatgagtatgcttcgcaactgaatatgtatctgaactatttcaaagcggaagtgatgcagccggatgataatccgcctatcggtattctgctttgtactgaaaagggtgatacattagtgaaatatgccactgccggattaaatccgaatatcttcgtacagaagtacatgatagaacttccaagcgaggaagaaataaaggagttcattgcttcctcaaattactaacctatcataaaagtaatgctggcgaaaagaagaaaactatttttcttttcgccagccacatataatttgctgtcaacaagaataagtttagtccgttttggatgtataaacaaaaggataaactaaactacatactgcacaacaagtataattacaattttcctcaaattttaattgattaatcaatcaaattttccgtcaattgacacgataattttacttggttgagttcagataattgatgcagttcttttcaatcttgtccaagatatgaagaaatgtatcttgttcttcttgtgatataccttttaatgagatgtttagagatagcatttgacatttatttatatgcggcataattgtttttaccttatcggtgcagtataaaagaacactccgtccatctttatgatttttccgcttgatgatatatccgtttttggataatttttcaactattctcgtaacattggcaaagtctttttgcgactgtgtaactaaatcaccaatagtctgaccatcgttttcccataaattgactaaaagaacccactgttccggcgttatgtccagcccctcttctgatataatttgatatatttgacgtttgattatacccgaaagtttggctattttatgatttaccattttatctatatccatattatttagtttgttaaaagctgaaaaacatatttgtcatatcaaacaaatgaccatatttgtcatgacaaatatagaaataatgtaatgagtaaccaaatggaagtaagtgtttttatagaaaatatccaaaaggctttcggagaaaaggtacaattaccctttgctttttggtattctgataaacagattaatgatgatttgaaaaaaatcaacggttgtttttttaaggagtttgaaaagctgattggtggtgaaccaatctctttgagtgccgatagaatcgggtgtatgggtggtaaattctatactggtttttcgaccatgaatgaaaaaatgcctatgtttgtttcaagcaaagaaaaatataagaaatcttcagaattggttcttgatttcgtagaaaaggcaaatgtgcagattacgacaaggcagtatttgaatatttcacccattactgaacttgaaaactttaataatgtagtggggattttctttttggctacccctgatatgcttttaggacttgcttcatggacattttacgataacaattcggatgatgcaattactgcaaaatttggttcgggatgttcttctattttttcagaagcaacattggaaaacagcaaaaatgggaaacgtacatttattggactgtttgacccctccgtgcgtcgctatatccatgagaatatattaagttttactataccaatgtcacgctttcgggagatgtattatacgatacaagatagctgcttgtcgaatacacctgcatggggaaaaattagagaacgcatttgtcgggagtgaagtgtattacaaagcatccgatgtccaaaagttcattaagaaaagattcagcgtaaccacattgcgaaagtttgaaacagagcactgcacgaagaagaaatgaatttgaaaagccggggcggtgaacatagttcaccactcgaggcagaattcagttataagcattcttctactttctcaatattccagccactttctattttgtagaaatatacaatatatctaacattattaacagtaacgataacatatcctttttccggtacacctgttataccgtaagtctgagcaatcaaaatatttgctttatgataaattcccgccaagtccatattaaactttttttaattctacacaaagttacccaaattcgtaaatagtaattctttgcttaatataatatcagaacataaaacagaatcctttcttttgcgaagctttaaacctttcaatctccaaagaaagcgatttcttcaactgccctgccataaacgacaaaaacggctggttggtttcttcgtcctgacattggcgtagagaaaggatatattcttccctatcctctttgaatatcttagtaggaaaaaggtgataacaaaactggatgtagttcatcagtaatcgagccgttcttccgttgccatccacccacggatgaatagttactaaattaaggtgggcattaaagctcaactcgtattgttcccgaaatgttcccattttcttttgcttctcttgaagaatcgcacaaagttcatccaccttagcaggaactttcaaatagttcatataagaatgtccgccaacaccagccgtaacaccacatagacggaactctcctttagaagaatcaaaagagccacccatcacactgtgaacgctgccagtagtacgcatcagcattgcattcatccttttcagaaaagcaggagttataggtacaaggctgtctgattcaactttggcaagttcgtacgcttgcttcaaatcttcattcatcagatgatgcacaagcggtttccctttcgctgttactccctcgtcaaagagaagctgtgtatcaagttcggtcaatgtggagccttctatggctgtggaatgggtaatgagagaataaaggtagtacttatcatagtccaccgcttcactgataccaagtttttgaaacttctggtacaacagttctatttcttgccaaacaccttgttccattacttttatttaataggctttatttcttttcaaaggtaacttatttactacgttcaaccaaaagaaataatgacttactgctatattttttgcacgtgtggggaaaatttaaacaaaaaaagctaagtgattgacttctcaacacttagcttttatctttgtacccagacccggggtcgaaccgggatggaagtgaatccactggtgtttgagaccagcgcgtctaccgattccgccatctgggcatctcttgaaacattgtttgtttctcgattgcggttgcaaaggtacgactttttttcatacctgcaaacttttcggcattttttttcaaaaaaagataaatatactacgatttatgggataacggacaatggttttctaaaaataagccctatattagcggaaactttaaaacgattttatatcatgacaaacagcaataattattgtgtcatcatggggggaggtataggtagccggttctggccatatagccgcaaaaaccttcctaaacaatttcttgatttcttcgggaccggacgttctctaatacagcaaacgtttgatcgttataaaaaaatagtccctatagaaaacatctttattacaaccaatgtattgtataaagaactgatccaagaacaactcccagaattggacaaatcacaaattttattggaacccacccgcagaaacactgccccatgtatagcttgggcttcttatcacataaaaaaactcaatccaaatgccaatgtcattgtcgcaccgtccgaccacctgattttaaaagaagatgagttcaaagatgcaattttgaaaggtctggaatttgtttcaaactctcctcaattactaacattaggtatcaaacctaacagaccggaaaccggctatggctatattcagattgaggaagaaaaacaaggagaattctttaaagtaaaaacattcattgaaaagccccaattggaatttgccaaagtattcgtagaaagtggagaattctattggaactcaggaatattcttatggaatatcaatacaattttagaagctttcaatgagattatgcccgaagtttgtaccaaactgactaacggagaagaagattttgcctcctgtcctaatatctccattgactatggaatcatggagaaagccaacaatgttttcgtccaattgtgcgacttcggatgggcagatttaggtacatgggactccttgtatgatatatcatccaaggaccaagaaggtaacgtcgtagtaaacggaaactccttattatataacagctataataatgtaatagtagtgccagaagggaaattagccgtaatacaggatctagaaggttatttagtagccgcaagagacaatgtattactcatatgcaaaaaagatgacgaaagcgctatccgaaaattcgtaaatgacgtacaaatcaaactaggagatcagtttgtataaaaacaggtaaccggagtttaatcataaaggaaagaaggtgtgtcaaaatgcgcaccttctttttttatgcacaaagccccgactttcacaagcaggggctttgttattacctaaagattttgtatctttaagcataacattttatactatgacaaagatacattttcgtccttacaatcccaaccaaacagtgctttttcctccaagaattgacgaggatattgcagagcatgatccagttcggatggttgacgctctggttgagagcctgaaccttgaaagtttcaggaagttgtataaggaatgcgggcgcagcccttaccatcccaggatgatgctcaaggtcattctgtatgcctatatgaacaacatctactcctgccggaaaatcgaaaagctccttcaccgtgacatccattatatctggcttgccggatatgagaaaccggatttcatcaccatcaaccgtttccgcaaccgggtgaagaatgaaatcaacgaggtgtttacccaaaccgtactccttctctcttccaaaggcttcatcagcttgaatgtggaatacattgacgggacaaagattgagtccaaagccaataagtatactttcgtctggcggaaaacggttgagcggaaccgtgaacgcctgatgaagaagatacatatcctgctagggcagatagacaatgtcatcgcccaggagaactcatcggaaagcaatgaggagattgagttcactccggtcatgctgactgaaatggcgggagaattgcgtcaagcactcgaacaggttcctgaaccctccacgaaagaggaaaagactgcgttgaaaaagaaacgcaaacagctgaaggagttggaagagcacagggacaagctacaggaatacgacaaccgtctggacacgctgcaggacaggaattcctattccaaaacggacaatgacgctactttcatgagaatgaaggaggatgccatgcgtaacggccagacaaagcccggttacaacctccagatcggcaccgggaaccagttcattaccgactttgcactcttcccgaaccctacggatacactgaccctgatacctttcctgcaatccttctcaagcagatatgacaggctggcccatacggtggttgccgattccggctacggttctgaggagaattaccgcttcatgtcagaaaacggtatggaagcctacgtcaagtacaactacttccacatggaacagcggccgagattcaaaccggacccgttcaaggcggaaaacttctactacaatgaagaacaagacttttgtatctgccccatgggacagaagatgcaaaggatagggactagacatgtgaaaacagcatccggatatgtcagcgaaaatgccaggtacagagccatcagatgtgaaggctgtccgctaagatgccgatgttttaaagcaaaggggaacagaacgatagagttgaatcacagactcagaaaatacaagcaaaaagccaaagagttgctctgctcagaggaagggctgaaacacagaggacagagatgcatagaaccggaagccgtgttcggacaaatgaaaaacaatatgaattacaaacgtttccgccattttggaaaggacaaggtcttcatggactttgccttctttgccattgccttcaatataaaaaagatgtgtgcaaaaatgactaaagaaggtatggattggctgattagaccgttttatgagcttacagttgttctatttaacgtgagttcgaaataagaataaatatatttcacttataattagaaacatagcgataaaagtattaaatttatagtgctgaattataacatttaaacgattaccactatgtttccagagtctaaagttacagagatttattgtatggccgatgatttttgcaaggaatttacattgcaacaggaaaaatatatgattaaggatatgaagaccatgcatcgtaacaaacccaaccgtatgagtgatgcagagattatggttattctaatcctgtttcactccggtggtttccgttgtttcaagcattactacaaggagtatgtctgtaaacatctgaaacacctttttcctcgtcaggtttcttataaccgttttgtggaactggagaaggaagtattgcttcccatgaccatattcatcaaaagagtactgctgggaacttgtaccggcatcagtttcgttgattccactcccttatgtgtatgtcgtaaccaaagaatcttgattcataagacatttgaagggcttgccgagcgtggaagatgttctatgggatggttcttcggattcaagctgcatctgataatcaatgacaagggtgaaatcctcaatttcatgttcacgcctggaaacgtggatgaccgggaaccgttgaaacagggtaggtttctggaaaacatcaaaggaaaactatgtgcagacaagggatatataggtcaggctctgtttgaaaaccttttccttaatggcatacaacttgttactaaagttaaaaataatatgaggaactcactgatgagtattgccgacaagattttgctaagaaaaagagccttgattgaaacggtcaatgacgaactgaagaacatcgcacagattgaacactcaagacatcgttcattcagtaactttatagccaactccttgtcggctatcgcggcatactgcttttttgaaaagaagcccgccattgacgtaaagtttgtcaatgacggacaacttgctattttttgattttatttcgaactcacgttatttagatgttgagaacgcataaatcaaagaaatcctcaaaatatcgcagcttaaaaaaatgagtcgatttttatagtcaatgaaaaaaagaaggcgcatcgtgtattacgacacaccttctctttatatttactaagaaagaaaaagattacttgtcaccaccttcccaggcttgattgattgctgttgccacctccacaaattcttcatttgtcagtttcaacttcgaattagaaaaaatcatatccgactctttctgaataggaatcagatgaatatgtgcatgaggaacctctaatccgattactgcctcacctactttcttgcacggaaaaaccttttgaatggcaagcgccacactctttgcaaaaacatgcatagcagccagttcattatcctccaaatcaaagatatagtccacctcacatttcggaacaaccaacgtatgccctttggctaacgggttgatatccagaaaagcatagaactggtcattttcagccactttatagctaggaatctcacctgtaataattctactaaatattgttgccatatctataagtattaaataaggcagccccgcatagcggacctgccttatatattaaaatgaaatattcacaacttccaagctgattttaccctgcggaatagtgatttcagccacatcacccactttttttcctaacaaaccctgtgctatcggagtatttaccgaaatcttgcccaattttaaattcgcttcgctttcggctacgatagtataaaccatcttcattccggtcttagcattcttcaattctactttcgtcaaaatttgcactgtatctgcattcatttttgaagtatcaataattttagcatcaccaatagttgatttcagctggctgatcttcatctccaatagaccttgcgcctctttggcagcatcatattcggcattttctgacaagtctcccttatcacgcgcttcggcaatagccgacacaattttaggacgttctactgattccagatatttcagttcctcaatcagttgcttgtaaccttcttctgacatataagccataatgttttcctccttttaaattatataattattcattgttccagttatgcctataaaaacaaaaagaattccgacatggaaatgtcggaaccctctttggtatttcaagtcttgcaaagatagacttttatctaatacgagtcaagtttataaggatgctatgtaacatgtttaaacaaattcaactcataattagctttttacaagagttttttaatggcttcatccaaatctttaatattctcaccacgggcacttaattcattattacgatttaccaaaaataccgaaggcagattagttacattatataatgaaatgtatgaagaataagcgccattagcgtcacgtacacagacccaaggcagattatctgcagatgttttccaaaagtgttcatcaccatccagtgaaatctggtaaatctcgaacccttgagaagcatacttattataaagttcacgtaacgccaaattatgtgcagcagacattgcattgttatatacagtaaaatcgatcagcaccactttacccttcaaatcggtcagactgcgtgtattgcctttcaagtctttcagctgaatatcaataatgctggcttccttgattttatcttcaggaatttccatggtctgctgacggggagtacgggtattcttcattccttttataaccatattgtacaagttgcgtgaacggtcggcatgtggataagcattattcagactcgtagccaccgcagcgaaacacttcacatcctccttatttgtcaaaggatcaaaaatcatatacccattcaacgactggaataaagcgaaataagcatatggcatatttggagccgcaaaaatatattctcgtttcactttattcttgtaattgtttaccatagccaaaaggctgtcttgtgcgatgcccgcagggatattacggttctgaccgagtttatccacattcttctgcaaatcagcttgcaacaacaccaattccttaattttcaaattgttttccgaaccttcaatacgataggcagtcgcaaaatcatttatctcagccttaactgatactgtttccgtagagtctacagcaaagtttatcactttattatctaaacgcaaacgatagaattcaggagattccgggcgcttctgtgcaaaactaaaacttccgctactgcccaattttgccgaatcaagcgctactatgccatccaatcccgacgcttccaaataaagcatcttatcttcagcaccattaatttcaccttgaactttgaacttcggtgcattgtcgcaggcgctcaaccctatcaacagaagtgcgagcaaaaaatatacattctttttcatcgctaaaattaatataaatgtgtgttctcttaataattttggatgcaaagatacgtcttttcgtggtttgtcaaagcatttatccaccttcttacacattaaaatgaaaaaaaacagtaatcatagtaactttttatctcattctcaccaaattagaagaataaatgcctatctttgcacgaattttagacgaaaaatatattaaaacattttttatgatcaatccaattgttaagacgatcgagcttcctgatggtagaaccatcacactcgaaacgggaaagctggcaaaacaggcagacggttctgtaatgctccgcatgggtaacaccatgttgctagctactgtttgtgcagcaaaagatgcagttcccggtacagattttatgccccttcaggtagagtacaaagaaaaatattcagcattcggacgttttcccggtggctttaccaaaagagaaggcaaagcttcagattatgaaatcctgacttgccgactggtagaccgcgcattgcgtcctttattccccgataatttccatgcagaggtttacgtaaacattgttcttttctcagctgatggaatagatatgcctgatgcattggcaggattggccgcttcagcagcattagccgtttccgacattcctttcggcggaccgatttctgaagtacgcgtagcacgtatcgatggccagttcgttatcaaccccactttcgaacaacttgagaaagctgatatggatctgatggttgcagccacatatgacaacatcatgatggtagaaggcgaaatgcaggaagtcagcgaacaagacttgctggctgccatgaaggctgctcacgaagcaatcaaagttcattgtaaagcgcagatggaactgatggaagaagtcggttctacagtaaaacgtgaatactgccacgaagaaaacgatgaagatttacgcaaagctgtacgcgaagcttgttatgataaagcatacgccatcgctgcttcaggaaacagaaacaagcatgaacgtcaagatgcttttgatgccatccgcgatgaattcaaaactcaatatacagaagaagaactggaagaaaaaggtgcattaatcgaccgttactaccacgatgtggaaaaggaagccatgcgtcgttgtattcttgatgaaggcaagcgtctggacggacgtaagacaactgaaattcgccctatctggtgcgaagtaggttatctgcccggccctcacggttctgccattttcacccgtggtgaaactcagtctttaacttctgtcacattaggcaccaagctagatgagaaaatcgtagacgatgttctggatcaacacagagaacgattcttgttacactacaacttccccccttattctaccggtgaagcaaaagcacaacgtggtgtaggtcgtcgtgaaatcggtcacgggcacttggcatggcgtgctttgaaaggacaaattcctgcaggctacccatacacagtacgtgtagtatctgatatcatggaatcaaatggttcttcttcaatggctactgtctgtgcaggaacgcttgcattaatggatgccggtgttgccatgaaaaaaccagtttcaggtattgccatgggcttgattaagaatgcaggtgaagaaaaatatgccgtattgtctgatattcttggagatgaggatcacttgggtgatatggacttcaaggttacaggtactcgtgatggtatcactgctacacagatggacatcaaggtagatggtctgtcattcgaaatcttggaaaaagcgttactgcaagcaaaagaaggtcgcgaacatattcttaacaagttaaccgaatgtatagccgaacctcgtaaagatttgaaaccgcatgctcctcgtattgaaacgatgactattcctaaagagttcattggggctatcatcggtccgggcggaaagattatccaaggtatgcaggaagaaaccggagcaaccatcacgattgaagaaactgatggagtaggtcgcattgagattgcgggaacaaacaagaaatgtattgacgatgctatgcgcattatcaagggtatcgttgccgttcccgaagtcggtgaagtctatgtaggtaaagtccgttcagtaatgccatatggcgtgttcgtagaattcttgcctggtaaagacggattgttacacatctctgaaattgactggaaacgtcttgaaacaatagaagaggccggtttaaaagaaggggatgaaatagaagtgaagttacttgatattgatcccaaaacaggtaaattcaagctctctcacaaagtattactgcctcgtcctgaaaagcaagaaaagaaataagaacattcttttttataccataaagagcgcaacctgttataggttacgctcttttttttaaggtaagccattaataataatgtaaaataaaaaagcgcaactaaataataattagtcgcgctatctgatatatcatacaaaagaaattcctccgctttatatgatatccggttataaggtaggatcaatcttcttgaacttcgaaatcatctttacctactccgcaaagagggcaaacccaatcatctggaatatcttcaaatgctgttcccggagcgattccaccttcaggatctccttctgccgggtcataaacccaaccacatactgtgcaaacgtactttttcataattgtctctgttttatgttttaaatattctttaaatacataacaaatatacaaggaaattgtttacttgcaaactatcccactaatatttttttaagctcttccattccttcggacgcacctttctgaattacatgcactttacgtcccgatgcaatgggcacctgcttaggatctattaaataaacaggagtgcgggcaggcacataattcaacaaaccggcagcaggatatacattaagcaaagttcctataattaaaaagatatcagctgtttcagcatattcaattgcagtttcaatcataggaacagattcaccaaaccatacaatgaacggacgaaactgggaaccgtctccggccaagtctcccaaatgtatctcatattcttccggctttaattctttaatataagctggattattaggttgccaactagatgtcaccttggtcagttcgccatgtaaatgaataatatgcgaacttccggcacgctcatgcaaattatcaatattttgagtgataacagtcacattaaagaacttttccatctcagaaaccagttcatgcccccggttaggctttacagcaagcaactgtttacgacgctcattataaaaatcaatcaccaatttagggtttgccgcatacccttccggagtagccacttgttccaccggatactgatcccataaaccacctgcatcacgaaatgtactgataccgctttctgcactcattccagcacctgttaaaactactaaattcttcatttctagtcctcctcttttaactaaacacacaaaaataagaaaaattaaattgttaaaaacagattcattcaaataaaacacctacctttgtgcgttttgtataaaacatcttataaaataaatagttatggataaattcagttacgccatcggccttggtattggccagaatttattgagcatgggtgctcaaagtattaatgttgaagactttgctcaagcaatcaaagacgtattagatagaaaagaaacggctatcagccacaacgaagcacgtgaaatcgtaaacaagtactttgaagaactggaaaccaaattgaatgcagagaatattgaaaagggaaaatcatttttggaggaaaacgcaaaaagaccgggggtcgtgacacttcccagcggcttacagtacgaagttatcacagaaggtaacggaaaaaaaccgagtgcaaccgaccgtgtaaaatgccattatgaaggtaccttgattgatgggactttgtttgacagttctatcaaacgcggcgaaccggctatctttggtgtgaaccaagtaatcaaaggatgggtggaagcactccaactgatgactgaaggtgctaaatggaaacttttcattccttcagaactagcctatggagcacaacaggcaggagaaatgattcctcctcacagcacattgatttttgaagtagaattaatcgaagtattataattattaaagcatttaaggcaaatgaaaaaaattagtttttttgtagcaatcgctgctgcagccagcttggcttcttgtacagcccaagcaccgaaagcaaacatgaagaatgacgtagactcactttcttacatgatgggtatcaccaacacgcaaggtctggatatgtatatgagccaacaactgggcgttgacacagcctatatggccgacttcatcagaggtgttaaagaaggtaccagcaagacaagtcctaaagatgttgcttatatggcaggtcttcagattggtcaacaagttggtggacgtatgttcgatatgatgagccaacgtattttcggaaatgactctactcaaagtttaagtaaagaaaacttcctggcaggtttcatggctgctttgcagaaaaaaggcatgaatgttactatggaagaagccaacgcctacgttcagtctaaagcagaagcaatcaaaacaaaagctactgaagcccagttcgctgaaaataaggctgccggtgaaaaattcctagctgaaaatgcaaagaaagagggtgttaaaactacatcaagcggattgcaatataagataattaaagaaggtaacggcgctgttcctaccgattcttctaaagtaaaagtaaactataaaggtactttgattgacggaactcagttcgacagttcatatgatcgtaaagaaccgactactttccgtgctaatcaagtaatcaaaggatggactgaagcactgacaatgatgccagtaggttctaaatgggaactttacatccctcaagacttggcttatggtgcacgtgaagccggtcagattaaacctttctctactttgattttcgaagtagaactggttggaattgaaaaataacctcattttaatacgatttacaaaaaagcgtggaacattcgtgtctcacgcttttcttttaacttgggatattcagtaaatgtctctaaaaaataagatggcatatgaagatgatagggcatgaccatttcatatgccattcttattgtcatttttccgtgctttctcacatacttctatccgacaggacatgacgttccggaagaagtctgatgacctcttctgattctgtgagtaaaatcatatcatgctgctttagctgttttgtttctgattttttctatcatcagtatggcatttgccgtatgtattccaaagaaaatccacagtatttccgtcttcctgtttctggcctttatccttgagagcgagtaatgttgcttttgagtgccgaagcttccttcaagccgtgttgccctttcttttgagagttcgcttctaagcaccttcctcaaaggctcatctttggccgcccttcccttgcgcacaaaggatgtggatatcccatattttgtacagaactttctgttggcattattggcatatatggaatcggcagccacacatcttacccttacattcataagcttctgctgcatacggatacagtccttcaagcgtataccctcattgaatgccttgaacgagaggtgttcgatgaacgatatgccgtctatctgtatattattgacctttgcaccgaactcgacggacttggtttccttgcctctgacgatgggacgtacataatgacggtcaatgctgacgatgcggtcactgactttccgcccttcaaacatttccttttcttgtacaagcacctttctgatgatggaaagacgcttatgataatcctgggtatatcggagtaaagcaccgtactcgctatggatcccatccctttgactgaggagcttttcaagaagcttgatcatacggcgcttaagcattcttgtccttgaagctctcctctttcttttcttgcagtaggacagataggattccgccacattcctgtatttgttgcgcggacgccttatgcccagctccctgcaatgccggcatatatgcctgtagagccattcgaggctttcccaaaggagtttcatgtccgtaggaaaacgcatgtggctttcatagcatgtggcatcggtcatgcagacgtgaaggttatcaagataaggtttccagtgtgaagccaggagctcctggaaagaatcaatgtcaaggcgggatgctatctcattacggatggcactgactatcttgaagttggttatgggaagggacgggggaatcataattccacagaaaatctggtagtgtatgttcccgttcagatgttccaccagttgcctgtcggagaagccggtgtatgccttcaggaccataagggcgatctttgcggaaggactgaatctgttcctgcgtcccaggcgccggtccgacaggccggcggcttttgccatacattcaaacggaaagaccgaatgaagcttgccaagctcactctcattaaaactcttgcggtatttttccagaatatcaaattctgtaaaacccaaagtagggtgaatttctgaaatattcactatctttgccatatcttattagtttggatatttcccccgttttggccgtcaaaccttattttcgggggaatacctaaagatacaaaaaagccaactaattcgcaatactttgtgtatgaattagttggctgattttgtaatatttaatgaatgtccctaacttgtccttctacaaatcaaattttcttttcctttatatctgtacgtgcctcaacaacatttactacataatcgcctaatttttcgcattcgctgataatatccatataatgatcccccgtctgataattatattccttattattcacatccaatacattctgatccttcaactggttgcggtaattgtttctctcattctctatattaaatgatttgttaggatcaaccaaatgatattcgtcttcttccaaagatactatttgttgcagtggaaggctgtacgatgcacctgtcaacaatccggtgaagcgattcgtggtcatagcacccaaaatatggcgcaaatgcccacctgtcagtttttgcaaagcctcactcacggttttcataccatatatcagaagtaccagtgagcctatcagtttcaaaaaaaacaaatattgacatgtagattctcttttatttagactctcttctttcttacactttattaaaaaacacagaggcacaaagtatttaacccatcataggttaaaccttgcacctctgcacctattctgttcaccatagccctttcaggtcaggatttcttttccttcacattgctactggcttccaccacatttactacataatcgcccagtttttcacattctccaataatatccatatagtgcacccccatctgataatcatactccttattattcacatccagcacattttggttctttagctgattacgatagttatttatttcattctctatattaaacgatttattcacatctaccacatgatgctcatcttccaccaacgaaatcatctgagacaaagcatcatcagtcaactggaacatctgatgaatatgatcatactgtttcggagtaaaatccatatcactgcgatgtttacgattgatagtacgtgccaaattataacagctgtccccgatactttctatttcagtcacttcacgaagcatagcacgaatttgcaacttactttcagaactcaaacgcccgtcggatacctgattcagataattagcgatctccacctccatgttatcgcttatattctcatatttctcaatacgactgaacaatttgttaaagtcattgtcattagtggtgtgaagcagatcccgcaccatgccaaacatacgatgagtacgctctgcaaagagattgatttccttgcgtgcctgcaatatagaaagctctgccgtagaaagcataccacctgtaataaagcgcaaacgatattcctcatcctgctctctctgaggaatgattttacagacagttttctctatcaacttgacaaaccaaataagaatcaacacattgcatatattaaaagtagtatgaaaagcagacagtttaaaagatacggcaacagccggatctgctgttctcattatatcttctacaaaccatgaaacccccatagttacaggcttgaaaaggcataacacccaaataaccccaaaaacattgaacaccaaatgagccagcgcagccctcctggcctgcgtattggcagtcagtgcggcaaggttagcggttatagtggtaccaatattctcgccaagtaccaacgcagcccccagctcaaaactaatccaaccattggcacacataatcaaagtaatagccatcgttgcagccgatgcctgtacaatcatggtaagaactgtaccgatgacaacaaataagataacagaaccaaatcccatatcagtatagttctgaacaaaagacaacatttcggggtttctacttaagtcaggagcattcgtcttcaagagagagaggcccataaacaaaaaagagaaaccgaatataaattctccaatggatttacggttactctttcctgaaaataataagggtacgccaacagccaataacggaagtgccatagcagcaatatctactttaaaccctaacgcagatataatccatgcagtgacagtggtaccgatatttgcccccataatgactccaattgattgtgaaagtgtaaggagtccggcattaacgaaacttactaccataacagtagtagcagaagaggattgaattaacgcagtgataagaacaccggttagcactccggttacccggttggtggtcatcgctgtgaggattttacgcagtctgtcaccagcaaacttttgcagcccctcactcatgattttcattccataaaggaatagcgccagtgaacctagcagctttaagaaatcataaaaagaatactccatctttaattaatttggtaggaattggctaatctcccttttattcagtaaatttcaagccgtttcactacgttagtaataattattacgattatgttacaaatctgttgcaaaaataacaatatttcaaagaatttcccaatcggaagctcacttttggatatttataatggttttaatctagatatcccatacgggccggtcagtgccaaagtcaataacaaagtagaaggactcaattaccgggcctataataataaggatgtagagttcctgaacatactgaatccttcaggaatgcgtacctatgtccgttcgctctgcttcatcttgtgcaaagcggtggaggacttataccctgatggaaaaatcatgcttgaacatcccgtatccaaaggatattattgcgccttgcagataggacgcgaaaccgggctagatgatgtttcccgtattaagcagcgaatgaaagagattgtggaagccaacatccctttccaccgttttgaatgtcacacaactgaagtagtagaactattccgccggaaaggaatgatggacaaagttagactgcttgaaacttcaggggaactttactcctattattatactttagaagataccattgactactactacggcagtctgttgcccagcaccggatatatccgcaaattcgacattgttaaatactatgacggcttgttgctgcgagtccccaaccgtcagaatccggaaatattggaggaagtagtaaaacaagaaaaaatgctggaagtattcaaagagcaccgacgctggaatcagattttaggtgtgggtactgtaggagatttcaatgtggcctgtaatgaaggttatgccaccgatctgattaatgtgtctgaagccttgcaggaaaaaaaaatttccaatattgctgatgagatataccacagaggaaaaaacggtcaaagagtaaaactggttcttatctccggtccatcctcttctggtaaaacgactttcagcaaacggctcagtatccagttgatggcaaacgggctgaaaccttaccccatctccctggacaattactttgttgaccgagaaaagacaccaaaagatgaaaaaggtgattatgattacgaatcattgtatgcattggatttggagttcttcaacaagcaattacaagatctgcttcatggaaaggaagtagagttaccacgtttcaacttcaccacaggaagaagggaatttaaaggtgacaaacttaagattgacgataacatgatattgattctcgaagggattcatgcacttaaccccgaattaacccctcatattcccgccgagaataaatataaaatatatgtatcggcattaaccactattctgctggacaatcataattatattccgactaccgacaaccgtttgttgcgccgtattatccgcgattacaaataccgtggctattccgcagaggaaacaatcagaagatggcccagcgtacgcgccggagaagaaaaatggatcttcccatatcaggaaaatgcagatgccatgttcaattctgccctgttgtttgaactggccattatgaaggattatgccattcctattctaaggaatgttcccaataacaaaccggaatattcagaagcataccgtttacgcaaattcttggaatatttcgcttcggtacaagataaagaattgcctcccacttctttactgagagagtttttaggaggaagcagtttccggtattaacctgttattaaacagtatataagttttgtttatgtgcaaaacaaactgtaatttcggccattattaaacaagtataagtgaatgcactccaaaggctatagaaaattgttcaactgcctgatgttctactactaagaacatttcttcttcaggagggtatgccaaaagccagcagactgtacattacaccaccataaagatggattaaatgacagcgtatcttacttttggcatacgtttctttctatttgatatcttattctcttgcacatcaattggtcggatccattaatccgcccttatggaaatttctatttatgaaccagtagaccttattataactcttatgaaaacaacaatcaacggtatgacagaccgtatccgacgcctacgtcaagaatcttttgatacacaaccttctttgtccatagaacgtgctctgatagaaaccgaattttacaaagaaaacgaaggaaagtatccaattcctattctaagagcactgaacttccttgaaatctgtaaacggaaaactatatacataggtgaagacgaactgattgtaggtgaacgtggaccacgccccaaagccgtatcgactttccctgaactgacctgtcacagcgtggaagaccttcatgtattgaacacccgcgaattgcagcgttacaccatcagccaggaagatatagacacctatgagcgcgaggtaattccttattggaaagggcgcacccaacgcgaacgcatcttcaatcacgttcccaaagaatggaaagaagcttacgaagtaggaatgttcactgaattcatggaacaacgagcccccggccatacttctctggacggaaaggtttatcaacatggcatgctggatttgaaagaacgtattgcacatgagttgaaaaatctggattttatgaatgatccagaagcaaccgacaaacaagaagaactgaccgccatgtccatctcctgtgatgccgctatcatttttgccgaacgccatgccgaactggccgaaaagatggctggacaagaaaccgatccgaaacgcaaagaggaactgaaaaaaatagcggaaatctgccgatgggttcctgcacatgccccccgtacttattgggaggccatacaaatgtactggtttgtccatctcggcaccattacagagctgaacggatgggacgccatgaatccaggacattttgaccagcacctcgctcctttctatgaaaaagacctggaagaaggaatactgacccgtgcagaggccaaagaactgatgtcatgtttctttatcaaagtaaataatcagacagccccacccaaagttggcatcaccgccaaagaaagcggtacctacaatgactttaccaatctgaatatcgatggcatcaaacgtgatggtagcaacggagtcagcgaagtatcctatatcatgctcgaaacagtagatgatcttcacctgttacaacccggaagcgccctgcacatcagtgtatgcaccccggagcgtttcctgcgcgaaggctgcaaagtaatccgtaagggctatggctacccatctgtattcaatcccgacacatacgtcatggaactgatgcgacagggaaaaacaccggaggacgctcgtgaaggcggatgtagcggatgcatagaagtaggcgctttcggaaaagaagcttacatactgaccggttaccttaacgtacccaagatattggaagtcaccttgcacaacggaacagatcctgtatcaggcaagaaagtaggcttggtaacaggagatccctgtaccttccggagttatgaagcactttatgacgcatttcttaaacaaatccattattttgtagatatgaaagtacgcgtcagcaactacattgaccgtatgttcgccaaatacgctcccgccactttcctgtctttgttcattgatgactgtatcgccaaaggaaaagattattataactgcggaccgcgttataacacaagctatattcaatgcaccggtttgggtactattaccgacagcctctccgttctgaaaaaacatgtattcgaagaacgtaaattcaatatggagcaaatcatccatgctaccgataccaacttcgaaggacaggaagccatgagacagttcatactgaaccgtacccctttcttcggtaacgatgacgaatatgcagaccgcatcgccatccagatctttaacgacctttacgatgccatcgagggaaagccgaacaccaaaggcgaatgtttccatctgaacatgttgtctaccacctgtcacgtttacttcggcaaaatgatgaatgccacccccaacggccgtctagccggacgtgccatcagtgacggtacctcaccctcacacggagcagatacccacgggccatccgccgttataaaatcattaggaaaactggaccaggtgaaaagcggaggcactctattgaatcagcgcttcctgccttcacttcttaaacacgatgaagacatagccaaactggtaagcctcatccgcagctattttgctttaggaggacatcacattcagttcaacatagtagataccgctaccctgcatgccgcccaaaaacatccggaagaataccgggacctattggtacgcgtagctggatacagtgattacttcaatgacatgaatacagatttacaatatgacgtaatagcccgcacggcacaagaaaccttctgacaagatgagtctgattttcgacatcaaacgctatgccatcaatgacggaccgggcatccgcatcacacttttcatgaaaggatgcccgctctcgtgcatatggtgccataatcccgaaggcattcgtaacggaaaagacaaactatacacagccaagaaatgcctcggctgtggaacttgtctgaaagcatgtcccaacggggcactgacactggctcccgagggtattatcaccgacaaacaaaaatgcgtgttatgcggacgctgtgccgaagaatgtccggcaatggctatcgagatatcaggaacggaatataccgccgaatacctgatgcatgaaatagaaaaggaaattccatttatggatcaatcgggcggtggagttactttttgtggtggagaaccgttgcttcatcccgaattcttgattgatatactgaaacgttgcggacaacagggaattcatcgggtggtagataccaccctgcttgcccgcaaagaaacagtggatgaagtgatgcggaattgtgaactattgcttatcgacttaaaatcaatggacagtaccgtacaccagacattttgtgatgttcccaatgaattaattttggagaacatccgcagagtagcagaagctgactttccttattatatccgtattccattgattgaaggagtgaatgcagatgaaaagaacataaagctgtctgccgaatttttggccagtcttccacggcatcctgagatcattaacctattaccttaccatgatataggaaagggaaagcatgcaaagctaggcagtatctataaccctaaaggatataaaatgcaaacgccatccgaggaagtacaacagcagtgcatacaaatcttgactgattacggtttaaaagcaaccataggtggataattatatatcatcgttctgtagtaaaaggaccttcgtaccccaaaaacgtgccccgtcctccgttatcaaataatcttcctcattacgcaactctgtaaactcacgataactctccaacttatcataatcgataaaatccttaaagcatttctccgctttccaacaatctattaatatagatacccggttctatagtaagttcaaattccggttccaaagatccgaccagccttaataatttacggctgacctaagtacttttctaatgaatcacctgtcttttagcaactgctttttccaaacacttcttcaaatccgcggcagaaccagtttctgtcactcccaccctctacgctttctcacacaaggcaggctggatcccatccatacaatatgatatccatatcgccaatccggcatagggcaagtcccaaaaataaagagaagtagaaccttggcggaaatgataagtattatccgcatagtcgccactctccccgttatctaaaatagcaagaaacctatccccacgttttttcaaactgttacgacggattgtataagtttcttttgcaaacataatcttatgttttttatatagatgacaggtaaagatagccatccccttaaaataatccccccaaaaaggaagattattacaatacaatttcctatttttgtcgcaataaacaaggaaataaaaatattatggcacaaggctcacgtcaagtacaaacacaagcccagcaacaaatacaaaccttatctccacaacagatactggtagtgaaattgctggaactgcccactgtggagctggaagaacgtatccattccgaaatactggataatccggccctggaggaagggaaagaaatgcccgaaaatgaagatgacaacacagaatacgttgagaacgaagacggaaatacagactcgaacgaagatttttcattaggcgattacagcaacgaagatgatattcccgattataaactacaggaacataatcgttccaaagaaggagtagccgaagaaatccctttctcggatgccgtatctttttatgaaatattgaaagaccagttgcagatgcaggaacttaccccagaacaacgagatatagcagaatacttgatcggttcattggacgatgacggcctgttacgcaaaaatatggagtctatcatggatgaacttgccatctatcgaggcatctataccactgaggaggaattaaataaaatcttggaaataatccaagactttgatccggcaggtatcggtgcccgcagtttacaagaatgtcttctgctacaaatacaaagaaaagccgattcaccgttaaaacaaatagaactggacatcatcggtaaatgctgtgatgagtttacccgcaaaaacaaagaaaggattatccaaaaactaggtattaccgaagaacaatataatgaggcggtgagcgatctcaccaaactgaatcctcgtccgggcagttcactgggtgaagcaatgggcaaaaatatgcagcagatcattcccgacttcattgtagaaacgtatgaggatgacaccattactctaagtttaaacaatcgtaatgttcctgagttgcgtctgagccgccagttcaccgaactactggatgaacacacccgcaacaaagataatcagagcaaagcctcaaaggacgcactgatgttcctaaaacaaaaagtagatgccgcacaaggttttatcaacgccgtaaaacagcgacaacatacgttgctcaccaccatgcaagccattatagatattcagcgccccttctttttggaaggagacgaatccctgctaaagcccatgatcctaaaagatgtagccgaacgctcgggattggatatttccaccatatcacgggtaagcaacagcaaatatgtacaaacaaactatggtatctattcgttgaaattctttttcagcgacggttacactaccgaagacggtgaagaactctcagtccgcgaaatcaagcgtattctgaaagaatgtgtagacaccgaagacaaggaaaaaccgtacactgatgatgaactggccgaaacactaaaaacgaaaggctaccccatagcccgccgtactgtagccaaataccgccaacagcttaacatacccgtcgcacgattaagaaggtaatataaattatatggaagctaacgaaataaccgaaacaatagcagtaggcaagaaaaacagtccgcttgaagtcagttcacgtatcatatcaggcatattcacgccttttatgattccttttgtggcatttttcctgctttttttcttcacttatcttcgtatcatgcccatccagtacaaactgatagtattgggcatagtctactgtttcaccattctgatgccgatgctcgccatctacctgttccaaaaaataaacggttggggtattcatgaattgggacaccgcgaaaaacgtttcgtaccatatgcgttgactatcatcagctatgtcacttgtctcatcaccatgtataagatacacctgccccgctatatgtcaggtattatcgtagccgccctcatctgcatgatcctttgcacgctgatcaatttcaagtggaaaatcagcacacacgtggcaagcagcggcatgatggtaggcggattattatcctacagctttatattcaatttcaatcctgtatggtggctctgttttttcattttgctatccgggatgcttggcacagcccgtatcattgtaaaacagcataccttattagaagttttagccggatttattgtcggattgttttgtggtgtcattggaattttgtttatttgaaaaaaattagtattaaccttataaattgaaagcattatggaatttccaagcaatgtaaagtataccaaagaacacgaatggatacgagtagaaggtgatatagcttatgtaggcatcactgattatgcacaagagcaactgggtgacatcgtattcgtagatatcacaactgaaggagaaactttagaaaaagatgaagttttcggtactattgaagtagtaaaaacgatttcggacttgttccttcccgtttcaggagaagttttggaacagaatgaagcattggccgacaatcccgaattagtaaaccaagacccgtatggtaaagggtggctgattaagattaagcccaatgactctaatgacgttaacgatttgctggatgctgaaggatataaagcattagtcaacgaataatatagattcccattaggaattgttcaagcgcggattacgcggacctcacggatttttctatccgcgttcatccgtataacccgtgcttgaagtaaatatataaaccaaacaataacaaaaaacaatgaaacctatcgtaagcattatcatgggtagcacttccgatcttcccgtaatggaaaaagctgccaaattactggacgagatgcacgtacctttcgaaatgaacgccctttcggcacaccgcactcccgaagctgtggaggaatttgcgaaaaatgctgcaggccgtggaattaaagtcatcattgccgctgccggcatggctgccgcacttcccggtgtcattgctgcaaataccacattgcctgttatcggtgtccccgttaaaggttctgttcttgatggcgtagacgcactttattctatcatccaaatgcctcccggaattcctgtagctaccgtagcaatcaatggagccatgaatgcagctattctggccgtacaaatgctagcattgagtgatacagaactagccaccaagtttgcagactacaagaccggcttgaaaaagaaaatcgtgaaagccaacgaagaactgaaagaagtcaagtttgaatataaaacaaattaactagtggttagtgattagtggtaagtggttaatatttcagcgcagcccactaatcactaaccactcaccactaatcactaactatggatttattcaattactcccgccgcgaatcttccgaagtgaatatcggagccactcccttgggtggcaacaaccccatccgtattcagagcatgacaaataccgtcactatggataccgaagcctgtgtggaacaagccaaacgcattatagatgccggcggtgaatacgttcgcctcaccacacaaggtgtccgtgaagccgaaaacttgaagaatatcaatatcggattacgctctcaaggatatgatactccattggtggccgatgtacattttaaccccaaagtagccgatgtagcggcacaatatgcagaaaaggtacgcatcaatccgggaaattacgtagacccgggacgtactttccggaaactggaatacactgacgaagaatatgcgcaagaaatagaaaagatacgtgcccgcttcattccttttctaaatatctgcaaggaaaaccacaccgccatccgcatcggggtaaaccacggttctctgtcagaccgcatcatgtctcattatggtgacacccctgaaggtatggtggaatcgtgcatggaatttctgcgtatctgtgttgcggaacatttcaacgatgtggttatttccatcaaagcatccaataccgtagtaatggtcaggacggtccgtctgctggtacaggaaatggaaaaggaaggcatggctttcccgcttcatttgggggttaccgaagcaggggacggcgaggacggaagaataaaatccgcattaggaataggcgcactccttgcagatggcttgggagataccattcgtgtttcattgagcgaggctcctgaaaacgaaattccggtagcccgcaaactggttgattatatactaactcgggaaggacatccttttattcctggaaaagaagctccgcagttcaactacctatctccggggcgccggaagactaaggctgtccgaaacattggaggagataatcttcccgtagtaatagccgaacgtctggaagggtctttcgaaactaatcctcagttcaaacctgactatatttattgcggtggaagtgtgccccaatcacgagataacaatatagcctatctagtagatgccaatgcatggaatccagaagacaaaaatgtctatccggcatttaactaccagcagatgatagaattacatcacacggtttccgatctgaaattcctgtttctgccctatatggctatgaatgacgaagtaatcgcagcccttaaactacatcccgaagtggtaatcatcgcccaaagcaatcatcccaaccgcctcggcgaatatcgtgccatgacacacgaactgatgaatgaagggttagagaatccggtcgtattcttccaatactatcaggaaacgaaagctgaagacctgcaaatcaaagcggcagctgatatgggtgcactaatttttgacggactctgtgacggaatcttcttgtacaaccaaggccccttgagtcatatagtggtagataccactgcatttggtatcctgcaagccggcagaatccgaaccagcaaaacggaatacatttcatgtccgggatgtggtcgtaccttatatgatttggagtctaccatcgcccgtatcaaaacagctacctcgcacttgaaaggtctgaagatcggcattatgggctgtattgtcaatggtcccggcgaaatggcggatgccgactatggctatgtaggtgccggtcgtggaaaaatcagcctctataaaaagaaagaatgcatagaaaaaaacattcccgaagatcaggctgttgagaagttgatcgagctcatcaaagccaatggtgactatacagaaaaataaaaacgtccaaattatggattatcaacagattctaaaagacatctatcaagaaatccagccctacgcctctattggcaaacaggctgattacattccggcacttgccaaaatcaacccagatcaattcggaatgtgtatccatacgatacaaaacaaaactttcatgcatggagaagccaccaccggcttctccatccaaagtatttcgaaagttttttcacttgccatgtgtttgagtcttgaaggagataatctatggaaaagagtaggtaaagaaccttcgggaacagctttcaactcactagtacaactggaggtagaaaaaggaattcctcggaatccctttattaacgccggagccattgtaatgacagatatcctgctgaaccatctgaaacaccccgaagaagaatatcttcgtttcgtccgctcaatcagcggaaataaccaaattcattataatgaagaagttgccctgtccgaacgtgaaaacggttatctgaatgcggcaatcaccaacctgttgaaatattatcataacatcgacaatgacatagaacgtgtacttcatttctatttcctgcaatgctccatagaaatgagttgttatgatttatccaaagcctttttgccgtttgccaaccataaacagacttttacattcgaaggaatcacgctgaccgcctctcaagtgaaacgtatcaatgccatcatgcaaacatgtggattctatgacgaagcaggagaattttcttatttggtaggtcttccggggaaaagtggtgtgggaggcggtatagccgcagtttacccactacgatattcagttgcagtgtggagcccgagattgaatccaaaaggaaattccgttatgggaatcaaggcgctggaactattgacaacacagacacaggaatctattttctaggaaacaagtatctctccatactcaatcatcttctttcttgttggaataatccagaatgaagttgaatataacacgcataatacttatagcctttctataaaagagagaagtacctggaatttatgtagaaattattgaccatgcttaataaataaccgtttttaccctcaatggaacatcttctgtttgccataaataaaagaaataaccgacagccaaagtcttttgaagatatcctgaacaggcacttaaaaacctgcctcagcatttcaaatgtccaagacaggttcccttatattttatagagatacagatcaatatctgtttctgccaccgccatagccattatctccgcgactaccaccatagccaccaccacgactgttgttaccgccacgataaccaccaccgccattgttgccatagctacgacgcggacgttcttctctaggacgagctactgacacagaaagagtttttccatccatatcaacttcattaagagctgcaatcgctttatctccagcttcatcatcagccatttcaacaaaaccatatcccttagaacgaccggtctctctgtccattataatcttaacagaaacaacttcaccatactctgcaaataattctccaagttcggcttcactcatattatagttaagccctgcaataaaaatgttcattttaaaataaatgttttaataaaaaaataagtgcgttttgctattaggaatcttacagagagacaaacgattctaccatcatcactaaagaataagttggaaaagtattaatgtacttctatgaggatacttaatgcaggggacaaatgtacgcaattagacttgaactcaaaactaattggagatttatttttaataataaatgttttttcgttctctttgaaagaacagacaagttttagaacggaaataactgttcctcaaatacatatttatactttaaaagctattatacagaaagttatcctgtactacatatcaaaaagataaccaatctccagccagatcagcattctttatagcaacaggccagatactttccgtagaaggaattattatggaagaaatttcaggaacaggaactacagaaaattcttcagtttccaaacaaactgcgagaaaccgcaaagtaataaaatacagaaagagaacttatctttttcatcttcccaaccataattccggattaagtttagccgtttccttacgaagttgaaaatgcaagaccgtattacccgaactatctgtatggatagtaccaagaacggtacgtgtattgactttgctgcctttagaaaccgatacggaagaaaggttgcaatagacagagatgtaattaccatgacgcaccagtatattgttcaaaccattatactggaaaatagccgaaacttctccattgaaaacggcacgtgcctgcgctcccggtttgcccttgatatcaatccctttattatccagtttcacattacgcaaaccatctacggcatactgtccgtaatggctgacaatcacgtatggaccagtaatgggaaccggcaaaataccccggttacgttcaaaactgcccgacagctggcggtcctcattattcagactgaacttctccaccggagcgaccttctttgtagactcatttttttccgtagatttagaacgggacgcccctcccgtagtttcacgctccgctttcttagctgctgccgcctttgcggcagcctcagcagcggctttcctacgagcttcctcctctgcacgctttctagctttctctatttcaatttcaatcaaacggtcaatctgggcattcaattgctcagccgaacgttttttcttccttatctcgctttgtatacctttctgcttcttttgcaaattcgccaaaagagtctggcgctccttttcctgaatctccagtttggccttttcaacctcaccctgttttaaaagattctgtttggcatgcttagtttgttccacttctctttttttagcggcaatttgcttctgcttacgttctatctccattccttgaaggcgctggaagtttgcatattcctgcacataacgcatacgacggtaagtctgactcaaattctcggcagaaaaaataaacattaatttctcttgaacagacttgttacgatacatgtattgcaccgaagtttcatacttccgcttcttgtctttcaaatcacgctgaagtttattcagttgtttctgtaaagaagcgatctcacttgtcaatgtatgaacatcactctctatggtattgatatattttcttctctcctcaatctgacctgtcagcaaagcaaggttgtccaactggcttttcacatcctttttggtagattgcaacaaagtttcagactcggcaatctgctggtgaagttccttccgtttggcttcaagctcccttattttccgagtactttgcgctgaaatagtacttaaaaagcagcaggctatgagtagtaagaagatacgtttcattatttaataagctgttttagcaaatcttgcaattctattctttcgtattttccgggcacttcggtatgagcttcccaatccttattggtagaaaggcgggaaagttcaaatacagccgtaaccggtttggcagccccttcaaaagaaaccgtcatagttcccggaaactgtctctgctccaacggacgaaacttatcataacgccaatttatcccgtaccgggtaccggacaagccgatatgactttctttcagcagcccatcatttgtattggtacgaaaacggtaggcgaaatgtttgccgttcttaacttctattaatgcattttcgttttcaggacgcacagcaaaggacgaaatatcacggacagtcagcaccttttttcccggaagaaaaatttcattcataaacaaggcctgcaaagtatgaaaatccaaatcagcctttgccagattcttcaattcatcaaaaggaacttgtacataacgtttgttcatgcgatccatcactaaaactccgtccggagatatttcagcacgtgccacttcaatacccaaaaatggagcgatagaaagctggattacttcatcacgtttcatgcgcaacgtaccatttactttagtcggtcctttaccgttcaagtcaacggccaatgacattttcgcagtaattgcatcccatcccggagaacggctaatcagctcttccatatattccgactcggataaattgccaatagatacccctttcttcatactccgggtagatgaacatgaagaaataaatataatcagcaaagcgctaaacaaataaaaacagacacgtttcatcattctgcaaagtatttcttttgtacaattttctttctcaataagttcaattccttttcactacgttcttcactaccttcttgaggaggctccttggataatttttccgcttgttgccaatattccaaagccttttcacgatctccattcatatagtaaatatctccacaatgctctacaacaacggaacttttacttccatcattctgcatagcctggtcaatgtaaatttttgcttctacatatttacctttctcaaaaagtatccaggcataggtatccagatacgtaccattggtaggttcggcctttacggtacggtaactcatttcttccgctttatctaggtttttacgctctacagacaggtaataggcataattattcaaggcccctatattgttttccttataaaccaaagcggaatcgtatgcggcatatgcctccacattcatcttctttatatgataaagatcccccataatggcatagaaatcagaaacgatatccttattgcttttatctgttacttgattcactccttttttaaaaacctccaatgcctcgtctgttttctctttctgatgataggccaatcccatataataatagaattccaatacatccggagtatattctaaagctggagcacacaatttgattacttcatccatattctgctcacgaatggcaaaactcaatagctgcaagcgtgccggcgtattttccggatcaatttcaagcacttggtgcaaaacaggggttgcctctttatccatctttttcgtcagaagatattgggccgccaacatagcaatatctgcattctcttgtttttccttcaatatagaagtaaacaggcctgctattttcgtactgtccttgttcgtttgctcggaacgcagaataagctggcgcataatgttcatctttgtatcgctatccacattatcattcagcaaaatagtatccaactgtacctgatacaaactatcctgcccttttttctcgtaataagaagccatggaaagcaacgccggcgcatagcccggttcttccttcaatactttctgataagtttcgtatgcttcttcttccttaccgttgttcagatagacatctcccaaaatggtaagataacgcatgtcatatggatattctttcgccaaattctcaatctccgtaaatgcctgctggtcattgttcatggccagatacatacggaatttctccatgctgatttgttcagacttcccatccaaggcttcaaggcggttcaatgtattaactacctgctgatagtccttggtacgggtatagagatcaatcaaagccatcaacggttccagacgtgaggggaactggctcgccatatcctcataaacataaatggctttcgggtaatttcccttaccttgataataggctgccaaagtttgcttataccaaaaactcttaggatcggcatccactgccttcttcaaagcttcctcccctttttccggctgattgagaaacatatggaagcgggaaatttcgaacaaagtagcggctccttgcggataaatgtccaaacagtgactatacatttcgaaagccgcatccaagtcacctttttccttcatccgaagcgcttccaaaaagaaatagtcgtatttacggcgctgctccggagtaagcggatccttttcctccacaacagctttatttccggacaagccggaagctctcttcaccgtaccgcatgaaacaagcatgcctatcagacatacacatagcatgggcacatatttcaatcttctattcattgtttccttttacttttttccggtatgtccaaagccacctgcaccacgttccgtttcgtccaacacctccacttcctgccattcggcatgttcgtgacgggctacaaccatttgcgcaatgcgctccccatcttctatcataaaatcctcagatgacaaattgaccaggataatacaaatttcaccacgataatcggcatcaattgtgcccggagaattcaggactccgatgcctttcttaatagccagcccgctacgtggacggatttgcgcttcaaaaccttcaggcaatgcgatataaagtcccgtaggaaccaaacaacgttgcaagggtttcagcacaatcggttcgtcaagattagcacggatatccatccctgccgattgcccggtagcatactcgggtaaagcatgttttgatttattgattacctgtattttcataattttaataatttatcaatatgcttatatggcaatgtgctaataatttgcagacaacaaacacagtccagacatgatacagcccattggcatattgacgaatcaacacattgccacatgattaataaggtgcgaatttacacatttagatggatttatctaagcgtttacagttttttaaacggaagtttcttacttttgcaaacagataaagcctgaattatgaactggaaacaattaatatcaaataaacgcttcggcatggaagaactacacgaggcccgtaaagatgaccgtaccgaattccaacgcgattatgaccgtctcatcttctcagcacctttccgtcgtttgcaaaacaaaactcaagtatttcctttaccgggtagcgtatttgtacacaaccggttgactcacagccttgaggtctcttgtgtggggcgttctttaggaaacgatgtcgccagccagcttctgaagaagcacccagccttggccgactcccatatatcggaaataggttccatcgtttcagccgcatgtctggcacacgatctgggaaatcctcctttcggtcattcgggggaaaaagccatttcaacttacttctcggaaggacaaggaatggcattgaaaaaagaactttcaccgatggaatgggatgatttaacccacttcgaaggaaatgccaatgcattccgcatcctcacccaccagtttgaaggaagacggaaaggagggttcgtgatgacctactccacactggcatccatcgtaaaataccctttttcctcacaattggcaggaaagaaatcaaaattcggcttcttcttaagcgaagaggctgattatcagaaaatagccggagaattagggattatccggctcagcaaaccggatgagcctttacgctacgcacgccatccgttggtctacctggtagaagccgcagatgatatttgttatcagatgatggacatagaagacgcacataaattaaaactgctgacacatgatgaaaccaaaggactgtatatgcagttctttgatgagaaaagaagaaaacgcattgaagaagtttgccggattgtaacagacgtcaatgaacagatagcttatttacgttcttcggtcataggcgcactgataaaggaatgcacacgagtatttactgaaaatgaagaaaagatattgaccggggaatttgaaggcaccctgataatgcacatttgcagtccattgaaagaggcctatgacaattgttctgcaattgcctttcaaagaatatatcgttccagcgatgtgctggacatagaattggcaggattcagggttatcagtaccttgattgacctgatgattaatgcagtgcgctctccggaaaaagcgtattcacaactacttatcaaccgcatatccggacagtacaatgtcaacgcacctactttatatggaaaaattcaagccgtgctggattacatatcgggcatgacagacgtatatgcgctcgacctctaccggaaaatcaaaggcaacagtctgccggcagtataataaaaacattgtcagatgcgagcacgatgaatcctgtaaattttatctgcacctgacaatgtttccccaaatactactattagtccgattatttggtcagtatgggatgagcgcctgaagttattttcatagcttcaggatgttgctttacaaacgattcgatatgacgtacccgtttgtcttccagaatttcattgactgcaatcagaattccggtttcctccacatctccgaatccataattaatcgctgttccaaacatacgcattgtaggagacagactcatatatgcattgaccaaaggaggaatattataccccagcttacgcacttccgtattcaagatcttgtaatcttctttaaaggaatcataacagaaaagattttccaacattttcttatctgtttctatttccagcggtttcatcggagttatcaatttatctttatcaccgaaatgtttattcaggaagtataatatcatgtcacgcccctgacgatgataactaggatacatagtcatcttaccaaaaaaatatttcacattaggcttaatcacggttaatgcgcccaaaccatcccacaaattatccaaagcaaacaatcccttggaaccggcacgggttgactgatattccaatgtaacaaatgagcgtcccaactccaccgtgtaaggcaaatattctttcaaaaaaacttccgagaaattaaacatgtgagcagtagccagcacaggcttcccatgttcatcaaattgcacctcatcccccaaaagataacgataacctcccaaaatctcctccgcttcaggattccatacaactaattgcttatatggattttccatcacgtcatattcatcgatatccatcgcctttcctgttccgccacctgcagcacgaaaggctatttctctcaaccggccaatctccttcatcacattgggcgaatcctgatacgttatgacgtaaatttcattatgacttttattcgtaaacctcaggcgtttatcctcggaaagttccgccttcagaatctctttgctaatcggtgcaataatttcttccatatcttttttctctcttttgtctattatagcttgtagactacatcttttacaaactgcgcccactgagccggggtctttgtcttgtcgaaagtttgccaaggaatgggttttccaatggtcaaggtaaaggttttatgacgatttttcaacatttcatctgccaagtaaagcatagcaatattaaacttaatgccaagtgccttacatatatttgccaaattataaaaaaagtctgagttccggccctcaaagtgcaaaggtaccacatcacgatgcgtttcaatacttttagtgacaaatgtctttttccattccaaatccttgatttccccaccctgtctacgggaacataaccccgcaggaaacataatgatatgattatccgaggcaaaccctgcctctaccatcttcgggaaatccctggattgcgagcctgttttattgataggaatacataaaggagccaaaccatgcaaattcatcaacaaatcattgaccaaatagcgtacattaccattgtaatgttttcccaatatataccccaaagcaactccatcctgtccccccagcgggtgattgctgacaaaagtgcatttaccgttttcaggcaagttttccaaaccttttatctccacttttgcatccaggaactccatacaagcttccagaaagtcaactccgactttatttttggagtcttttaaaaagacattcagttcatcctgatgcacgatatgcttcaggtacgaaacgacaaaacggggaatatatttatattttttcccggctttcgttttcaatatcttttctatgtcgattaaaaatatagagtcgtcagtcattttgcaaacgttcttttccatgcaaaagtaacttatcttttttatattggcaatttatgacagaaaaaactcttaatctctaaagaaattaagagtttttgtgtatgaaactatacaaattctttcatttttgcgcaaaacaaaaacgaatgtgcaatagtttggtttcgtttttcaacctccgagaagctgccctttccattattttttatcataaaattattaattttaaacctcctgtttaccaagctactagctacattaacagcctgttgaaaacttctcgaaatattttcttaaaatattgtggggaattgtggggaattgtgtaattttacaccttgaacaatataataaggtgtaaacatgcgatttcttgggaattctgaagcaaagacggatgcaaaaggcagagtgttcctgcctgccgtattcaggaagcagctacaagctgcctcccaggagtgcctgattttacgcaaagacacctaccaagactgcctggtactttaccctgaaaatgtgtggaacgaacaaatgaacgaactacgttgcaaactcaatcgctggaattccagacaccaaatgattttccgtcagttcgtttcggatgtagaagttatcacattggatggaaacgggcgctttctgattccaaaacgatatttgaaattagctaaaatacagcaagatgtacgttttatcggattggacgacactatagaaatctggtctaaagaaatagcagacaaacccttcatcacaccggaggactttggaaaagaattggaagaaattatgggaactaataacaacgtagaaatagaatgagtgaagcaaaacagatatatcatgtaccggtattattaaacgagagcgtagacggaatgaacatccaacccggaggtatttatgtagatgccactttcggcggcggaggacattccaaggaaattctaagccggctgggtagcaccgcgcatctatatagttttgaccaagatgaagatgccgagaagaatattgtaagcgacagccgcttcacttttgtgcgtagtaacttccgctaccttcccaacttcctacgttattatggcgtggaaggggtggatgccattttggccgatctgggcgtttcctcacatcactttgacgactccgaacgtggattctcattccgcttcgagggcaaattagacatgcggatgaacaaacgcgcaggtatgacagctgctgatgtagtgaacacctatgacgaagaacgtttggctaatattttctatttatatggtgaattgaagaacagccgcaaactggcatcagccatcgttaaagcacgaggtgtaaaacaaattgtcaccatcggtgatttcctcgaagtcatcaaaccgcttttcgggcgggaacgtgaaaagaaagagctcgcaaaggtgttccaagctttacgcatagaggtaaatcaggaaatggaagcattgaaagaaatgctttatgcagcaaccaaggcactgaaaccgggaggcagactggtagtaatcacctatcactctttagaagaccgcatggtaaagaatatcatgaaaaccggaaacatagaaggcaaggccgaacaagatttctttggtaatgtacagacacctttcaaactagtcaacaacaaagttattgttgccggcaacgaagaagtgacacgcaatccgcgctcccgaagcgccaagttgagaattgcagaaaagagataacgagatggaagaagaactgaaacaaaatacacaacaacccaaagacggacaatctgcttcgcccaagcatatgtctatccgcagcatattaggaggagatatccttgcgaacgactttttcaaaagacagacccgtttgctgattctcatcatgatcctgactgtactatacatagacaaccgttatagcagccaacaggaactcattgaaattgacaagttgaaaaaagatttgatcgatatcaaatacgatgcattgacacgctcttccgaactgatggaaaagagccgccagtcacgtattgaagaatatatttcgacggaagacagccccttgcaaacggctaccaaccgtccttatttaataaagaaagactaagcccatgatgcccaaccaaaaaaacataatgctccgcttctccttcatcatcctggtcatggtgttgataggcattgccattatctgcaaagccggcgtcatcatgtttgccgagcgtcaatactggaaagacgtagccgaccgttttgtaaaagaaaacgtcaccgtacgtcctacccgtggcaacatcatctcatccgacggccagctgatggcaagcagccttcccgaatataagatttacatggacttcatgataaataaaaggaagggcgaaaccgaagaagaggaaaagaaacggctgaagctacaacatatcaaagactcagttctttatgcaaaccttgacacaatctgcaaagggttacatgaaatattccctgataaaagtgccgcctttttcaaacagcacatcaaaaacggaagaaaaaaagagagccgcagttggttgctctaccccaaacgcatttcttatatacaatataaagaagcaaaacgtctgcccgtatttaacctgaacaaatacaaaggcggattccatgaacaggcattcaatcaacggaaaaagccttttggctcactggcaatgcgtacattaggagatatgtatccagatatagaacaaggtgcaaagaacgggttggaactttcatacgattccatattaaaaggcagaaacggtatcactcaccgtcaaaaggtaatgaacaaatacctgaacattgtagatattcctcctgtagatggctgtgatatcattacgaccattgatgtaggtatgcaagacatcgcagaaaaagcattggtggatgaattgaaagaaatcaacgctactgtaggcgttgccattctgatggaagtgcagacgggagacattaaagctatcgtcaacatgaccaaatgcaatgacggcatttacagagaaatacgcaataacgccatctcagacatgatggagccaggctctactttcaaaaccgcatccatactggtagcgctggacgacggagtcatcactccggaaacggtggtggaaaccggtaacggggtctatatgatgcacggccgctatatgaaagatcataactggcatcgtggaggctacggcactatcaacacaacaaaatcattgatggtgtcctcaaacatcggtgtatcacggttgatcgatgatcattatcatgataatccggaaaagtttgtacgcggactgcatcgagtaggcattgccactccgttagatctcgatattcccggtgccggcaagccgaacatccgcatccccaacaaagacttgagcaattggtcacgtactgcactggcatggatgtctattggctatgaaacccaaattccccccatcaatacactggcattttataatgctatagccaataacggagtaatggtcaagccccgttttgtgaaatcaatagtcaaagacgggcaggtagtggaagatattgctcctgaaatactcaacccggccatcgcttcccccaaggctatcagcgagatacaaacgattttggaaaaagtcgtcagcgaaggactgggaaagaaagcaggatccaagcaattccatgtatccgggaaaaccggtactgcacaggtttcacaagggaaagccgggtacacgaatggcacacgccgttatttggtaagtttctgtggatattttccttcagaagcgcctaaatacagttgcattgtagccatccagaaacctggactccccgcctcgggtggtctgatggccggcagcgtgttcagtaaaattgccgaacgcgtatttgccaaacatctggcacaagatttgaaagaagcaaaagactcaacttctatccttattccggatgtgaaaaacggggatataagtgcggcgcattatgtactgaaccggataaatgtaaattcatccggagtttcggaacaatcaaccgaaggcaaaccggtatggggaaatgtgactagtaatccggacaatgtattattcaacaaaaaagacattaacaataaacttgtaccaagtgttattggtatgggcgcaaaggatgctgtctatctgcttgaaagcatgggattgaaagcccgcattaccggcatcggtaaagtgaagtcacaaagtatcccggccggcaacactttgcgcaaaggacaaaccatacaattacgattaaattaacagtgtaacaggaagaatatgaaactggaaaagattattaaaggaataacagtcaatgaaatcataggtgatgcatcccaagaaatttcgggaataaacatggactcgcgcctgatagagcctggtcatattttcgttgctgtaaaaggaacgcagactgacggacacacttatattcaaaaagcaatagaaaaaggagcccgtacagtggtatgtgagaatcttcctgagacattgattgagaatgttacctacatcaaagtgaacgatacggaagacgttgtcgggaaactggcaactacgttttacggcgaccccacctcgaaattggaactggtcggtgttacaggcaccaacggaaaaacgactattgccaccttattatataatatgttccgtaaattcggatataagacaggactcatttccactgtatgcaattatatagatgaggaagccattccaactgaccataccacccctgaccctattacactaaacaaactgctggggcgcatggcagatgaaggatgcaaatatgcctttatggaagtaagctcacattctgtagcacaaaaacggatcggtggtttaaaattcgtaggcggtatatttaccaaccttacccgtgaccatctggactaccataaaactgtagagaactatctgaaagccaaaaaagcattctttgacggtctgcctaaaacagcctttgccttaaccaatctggatgacaaaaacggattggtcatgactcaaaataccaaagcaaaggtacacacctattcgctgcgcagcttgagtgattttaaaggaaaagtgctggaagatggattcgaaggaatgctgcttgatataaataatgtggaagtcaatgtacagttcatcggacgtttcaatgcttccaacctgctggcagtctatggagcagcctgcctgcttgggaaaaagacagaagaggtattgctggcattgagtactcttcgccccgttgccgggcgttttgactcactgcgctcacccaagggatacaccgccattgtggactatgcccatactccggatgccttggaaaatgtgctgaatgccattcacgaggtcctgaatggcaaaggtcatgtaattacggtagtaggcgccggcggcaaccgcgataaaggcaaacgccccttgatggcacaagaagcggtaaagcaaagcgataaagtcattatcacctctgacaatccccgttttgaagagccgcaggaaatcatcaatgatatgctggcagggctgactaaagaggatatgcgtaaagtgataagcatagccgaccgtaaagaagcgatccgtacagcttgtatgctggcccaagctaaagatgtcattttagttgccgggaaaggacacgaaaattatcaggaaatcaaaggtataaagcaccatttcgacgataaagaagtattaagagatatttttgctaatgaataaaccaaccaaaagatgttatattatttatttcaatatttagaaaagttcgattttcccggagccggtatgttcggttacgtttcattccgttcattgatggcaatcattttatcattgttgatctcagctatcttcggtgaatatttcatcaacctgctcaaacgtaaacaaataaccgaaacccaacgtgacgcatctatagacccttttaatgtgaaaaaagttggtgtgccgacgatgggaggtataattattattgtcgcaattctcataccttgcctcttgttggggaagctgcataatatttacatgatattaatgttgattaccaccatttggctgggtacgttaggctttttggacgactatatcaaggtcttccgtaaagacaaagaagggttgcacggcaaattcaagatcatcggccaagtaggtttgggactcattgtgggactcaccttatatttaagtccgagcgtggttatccgtgagaacgtagaaatacaaagaggaggagaaattgtggaagtggtgcacaaggaacaagatcagaagtccaccaaaactacgattcctttcttcaagaacaacaatttggattatgctgatttcgtaggttttctgggagacaatgcccaggctgtaggttggattattttcgtattagttaccatcttcgtagttactgccgtatctaacggtgccaacctgaatgacgggatggacgggatggcagccggaaattctgctatcatcggtcttaccttaggcatattggcatacgtatccagccacatcgaatatgcaggataccttaatatcatgtacattcccggcagtgaagaactggtaatctttatctgctccttcatcggcgcactgatcggtttcctttggtacaatgcttttcccgcccaagtatttatgggcgataccggcagcttgaccattggtggtatcatagcggtatttgcaatcatcattcataaagagttgcttatacctattctctgtggaatcttcttggtagaaaacctttcggtcattctacaggtgagatatttcaaaagcggaaaaaagaaaggacatttgcaacgcgtattcaaacgtgcccctatccacgaccatttccgcactacattagcacagttagaccccaattgcagttatctgttcatgaaacccaacagcgtattccatgagtcaaaaatcacggtacgcttctggattgtcaccatcgtactcgctgcaattacgattattacattaaagataagataagataaacgaagattatggctaaaagaattgtcatactaggagccggagaaagcggtgcgggagcagccgttctggcaaagaaacaaggtttcgacaccttcgtttcagacatgtccacgattaaggacatatacaaaaacatgctgaacgagcgaggcatcgaatgggaagaaggcaaacataccgaatctctcattctgaatgcggatgaagtaatcaaaagtccgggtattccgaatgatgccccgatgattcttaagttaaagtcacaaggcacccctatcatctccgaaatagaatttgcgggacgttataccaatgccaaaatgatttgcattacaggaagtaatggaaaaacaacaactacttcgctgatttatcatatcttcaagaaagcaggtatgaatgtgggactagccggaaatatcggccaaagtctggcatatcaggtagcagaatgcaactatgattattatgtgatcgagttaagcagtttccaattggacaatatgtacaagttccatgccaacattgccgtattgatgaacatcacgccggatcatctggaccgttacgaccaccagatgcaaaactatgtggatgccaaattccgcattatccagaaccagaccccggacgatgccttcatcttctggaacgatgaccccatcatccagcgtgaattacacaaatatggcattcatggccattactacccttttgccgaaaggaaagaggaaggaaccgccgcatacgtggaacaggacaaggtttattttacagaaccaatcgctttcaacatggaacaggaggaactggcgctgaccggaacccataatctgttcaactccatggcggccggtatctctgccaacctggcgggtatccgcaaagagtgtatccgcgaggccttgggtgatttcaagggagtggaacaccgccttgaaaaagtctgccgggtaagaggggtagattatatcaatgactccaaggctaccaatgtgaattcctgctggtatgctttgcaaagcatgaaaaccaaaaccatcctgatattaggcgggaaagacaaaggcaacgactataacgaaattgccgacttggtaaaagaaaaatgtaccggattgatctacatgggattgcacaatgagaaattgcatgatttctttgacaagttcggcctgcctgtagccgatgtacaaagcatgaaggatgccgtagacgctgcttaccggatggccaagaaaggcgaaaccgtattattaagtccatgctgcgccagcttcgaccttttcaaaagttacgaagaccgtggcgagcagttcaaggaatgtgtaagaaacctgtaatatagtattaaggtatatagataatggatctgataaaagacttgttcaagggcgacaaagtaatctggattattttcctgtttctttgtctgatctctatcgtcgaggtatttagtgccgccagcacgcttacctacaaaagtggggatcattggggacctatcacccagcacagtgtcatcctgatggtaggtgtgtgcattgtggtactggtacataacattccctacaaatatttccgtgtgtttcccgtcttcctgctacccctatcgacattattgctgatatttgtaatgggtatgggattgattaccggagaccgtgtcaatggtgcagcccgttggatgactttcttcggtatccagttccagccttccgaactggcaaaaatggccgtgattattgtcaccgcatttattctatccaagtttcaggaagaagacaatgccaatccgaaagcatttaaatatatcatgtggatcaccggaattgttttcattctgattgctcccgaaaacggctctaccgcagcactgcttttcggagtagtctttttaatgatggtgatcggccgggtaccctggaagcaattggccaagttaatgggaatagccggagttatggtggctttttttgtaggcatagtgatgattatgcccacacacaaactgaacaaagtccccatgatgcaccgtgtagaaacctggcagaaccgtataaaaggcttctttgaggacaaagaagccgttcccgccgccaaatatgatatagacaaggacgcccagatagcacacgccaatattgctatcgcctccagcaacatcataggaaagatgccgggtaacagtgtgcagcgggatttcctgtcacaagcattctcggacttcatctttgctataatcatagaagagctggggttgctgggaggcgcctttgtagtgattctctacatctggctgttgatgcgggcgggtaaaatagcccgaagaagtgaaaaaagttttcctgcctttctggtgatgggcatcgccctgttgctggtatctcaggcgatgcttaacatgatggtggccgtaggtctgttccccgtcaccggacaacccctgccgcttatcagcaaagggggaacctctacactcatcaactgcgcctacatcggtatgatattaagtgtcagccgctacgtggctgagaaagaagaacagaaagccgccgagcaacaagcgcagaaagaagccgaactggcagccaagaccgaacggcatcaggaaatggtagctgccatgcaggaagccattaccacacttccgtcgggtgacaatgccaccacttccctcccgccggaggagaactcgctgcccgatgacttgaaggcaatgctgaatgcagccgggaagcgggagccggaagaagaaatataatataaaccattcattttaaaagtattatttatacttttgcgaataattcgactaaaaaggaattatggaagaaaatttaagaatcatcatcagcggaggaggaaccgggggacacattttccccgcagtctctattgccaacgccatcaaggaacaacatcccgaagcggaaatcctgttcgtaggcgctgaaggcagaatggagatgcaacgcgttcctgctgccggataccctataaaaggattacctgttgccggattcgaccgtaagaacttattgaaaaatgtttcggttcttttcaaattggtcaaaagccagctattggcacgtaaaatcatcaaggatttcaagccacatgcagcagtaggtgtaggcggatatgccagcggtcctactttgaaaatggccgggatgatgggtattccgacactgatacaagagcagaactcttatgccggagtaaccaacaaactattggcaaagaaagcctgcaaaatatgcgtggcatacgacggcatggaacgtttctttgaaaaagacaagattatcctgaccggaaaccctgtccgccaaggactgcgcaaccatcacatcagccgtgaagaggctatccgctccttcgggctggacccatccaagaaaacaatcctgattgtaggaggaagcttgggagcacgcaccatcaacaactgcgtgatggaaggtttggacaagattaaagcatccggcgcgcagtttatctggcaaaccgggaaaatatatatcggcgaagcacgcgccgcagtagcccaggccggtgagttaccaatgctccacgtaaccgattttatcagcgatatggccgccgcatacagtgctgccgatttaataatcagccgtgccggagcaggttccatctccgagttctgtttgttgcagaaacccgtcattctggttccgtcgcctaatgtggccgaagatcatcagaccaagaacgcactggcgctggtcaataaaaacgcagcactctatatcaaggacgccgctgccaaagaagctctgctggacaaagcggttgaaaccgtgaaacagccggaaacattgaaaagtttaagtacaaatattgctaaattagcctttaccgactcagccaacgttattgcccgggaggtattcaaactggctgataaatacagaaaagaaaatggacgttaacacattaaaatcagtttatttcatcggtgccggaggtatcggcatgagcgcattggtacgctacttcctgtcaaaaggcaagaaggtaggcggatatgaccgtacgcccagtgaactgacagaaaagctgatagaagaaggagcagccatccattacgaagaaagcacggaactgataacggatgcattccgcgacccggcaactacattggttgtctatactccggctgtccccgatacacataaagagtttacctatttccgggaaaacggtttcgagatacataaacgttcgcaggtattgggaatgcttacccatgcaggaaaaggactttgtgtagccggcactcacggtaagaccaccacttctaccatgacagcccatctgttacaccaatcccatgtaggatgcaacgcctttttgggaggcatctcaaagaattacggcaccaacctgctgttgtctgacagcagtgaatacatggttattgaagccgacgagttcgaccgttctttccattggctctcgccctacatatcggtgattaccgcaaccgatcccgaccatctggatatctacggaaccaaagaggcttatctggaaagcttccgcaaatacacctcactcatccagccgggaggtgcattgattgtacgtaaaggcatcgagctgcaaccggctttgcagaatggtgtgaaactgtacacctattcccaagaagagggtgactttcatgcagagaatatccgtattgggaacggtgagattttctttgattacgtatcacccttgggaaatatccccaatatacagttgggtgtccccgtcagtatcaacattgagaacggggtagccgccatggctttggcgcagatgagcggattgactgacgaagaaataaagagaggtatggcaagtttccgcggagtagaccgtcgtttcgatttcaagataaagaacgacaaggtggttttcctgagcgactatgcgcaccatccttccgagataaaacaaagcatactctccatgcgtgccctctatcgggacaagaagctgacggctgttttccagccgcacctctacacacgtacccgtgatttctacaaagatttcgccgacagcctttccttgttggacgaagtcatcctggtagatatctatccggcacgcgagcaacccatccccggcgtcaccagcaaactgatttacgaccatctgcgtccgggcatcgagaagagcatgtgcaagaaagaagaaattctagacgtactgagcaagaaagatatagaagtattaatcaccctgggtgcgggcgacatagataactatgtaccccaaatctgcggattactgaataaaaaatgataaagaaaattctcatactcctgtttctgttgctgataaccgcctaccttattgtagccgttaccgctttcaacaccaagcctgccgaccaggtttgcaagggtatggaattgattatcaaggacagtatagaccatggtttcatcagccagaaagggatactccgcttactgaacggtaagaagctctcccctgtgggtaagaagatgggcgacatcaacacccgcctgctggaagaagagctcagccaacatcccttgattgaaaatgtggaatgttaccgtacaccgggatgcaagataggtatcgaagtgacacagcgcctccccatcctcagagtgatggcaaacaacggagacaactattatattgacaataaaggaaaaatcatgccgatacccaacagttcggcacacgtagctgttgttacaggatacgtggatcgtgattttgccgtcaaggaactatataccttaggagtctttctacaggcccatccgctatgggatgcccagatagagcagatcaacgtgacacaagccaaagaactggaactggttccacgggttggcgaacatatcatattcttaggcaagcccgggaattatgaggaaaagttcgagaaactaaaaactttttatgagaaaggactgaaccaagtaggctggaacaagtacagccgcatcagtctggaatttaataatcagattatttgtactaaaaaagagaagtaagatatggcagcaacagattttatagtagcaatagaactgggatcctccaagatcacaggtattgcaggaaagaaacatgcggacggaagcatacaagtgctggccctcgccagcgaaaactcttcggattttatccgtaagggagtgatttacaatctggacaaaaccgcacaaagccttacttcgattatcaagaaactggaatcgacattaaaggcttctatcggaaaggtctatgtaggtatcggaggacaatctctacgcaccatccgtaatacggaggtacgtcatctggaagaagaaaccaaaatttcacaggaactgattgactccatcatggacagcaaccgcgaagtccccatcatagaccaggaaatactggaagtggccccccaggaatataaagtaggcatcaacctgctggccgatcctgtaggagttcccagcgatcatatagaagggcgtttccttaatatcatcgcccgcaacagcgtgaagcagaacattgacaaatgtttcaaacaggcaggaatcgaaatagccgactatatcatctcaccgttggctctggccaatgccgtactgaccaacagtgaaaaacgttcgggctgcatgttcatcgactttggcgcagatacgactactgtatctgtctacaaaaacaacatactccgccatttggcagtcatcccactgggaggaagcaacatcaccaaagacatttgcagccagcagattgaagaggaagatgccgaagaactgaaaaagaaatacggcaatgcctatgccgacaagtcggaagacggagatgacaaccctacctactcgctggacgggaaatgcagtattgagtcacacttactggaagacatcgtagaagcgcgtgtcaatgagatactggccaatgtatggaaccagattgttctttcgggatatgaagacaaactgctggcaggagctatcattaccggcggtgccgccaatctaaagaatatggaggaagcattcagcaaccgtaccaaagtagaaaaggtaagaatggccaaagaaagccagctaagcctgaaaggtggcatgatggaactgaaaaaagatggtacatgcaatacaatcatcgctttgttaggagccgggaaagagaactgttaccgcccggaacgtcctatccaagtacctctcttcgatgaaagcggcgagaatgtggaagacaaaaggaaaagagagaaagaagaagcagccagaatagcagcggcagccaagaaagcagaggaagaggagaagctgcgaaaagccacttgcgagagcctgataagaaacgcaaaagagctgaaagaggcaggcaaatacaaaaatgccttgtcgcaactggccaaagcacgcgatctgggagtggcagaagctttgaaccaaatacgcgacctggaaaaagaaatcaagagtttgaaagaagccaacaatccgatcaaacggctgaccgacttgtttggaaggattctggaagaataataacgaattacatcaccttaatataatatagaagattatgtctgatgaaactataatgccattcgatttcccggcagaaaacccgactatcattaaagtaatcggtgtgggaggtggcggcggcaatgccgtaaatcacatgtataaagaaggtatacacgatgtaacatttgttgtgtgcaacacagataaccaggcgttggccgaatcccccgttcccgtgaagttgcaactgggaaaagaaggattaggagccggaaaccgcccggagcgtgcacgtgaagcagccgaagaaagtatagaagacgtaaaaggaatgttgaacgacggctgtaaaatggtatttatcactgccggaatgggaggaggtaccggaaccggtgcggctccgatcattgccaagacagccaaagatatggatatcctcaccgtaggtattgtcaccattccgttcctttttgaaggaaaccggaagattgaccaggcgctggacggcgtggagaaaatgagccagcatgtagatgccctgctggtgatcaacaatgaacgtctgcgtgatatttattcggacttcagcgtgatgaacgctttcggcaaagcggatgacactttatccatagcagccaagagtattgccgagattatcactatccgcggtaccatcaacctggacttcaatgacgtgaaaacagtactaaaagatggtggggtagccattatgagtacgggatacggcaaaggggaaagccgcgtgagccaggctatcaatgatgcgctccattccccgctgctgaacaacaacgatatcttcaactcgaagaagatcctgttcaacatctctttcagcaccaagagcgagttgatgatggaagagatgaatgaggttcatgacttcatgagcaaattcggcaaagacgtggaaaccaaatgggggctctatatcgacgagtcgctggaagaacaggtgaagttcaccgtacttgccaccggcttcggcatcaaggatgtaccgggcatggacaacatgatgaacaaacgcaccatcgaggaacaaaagaaactggaagaactggaagaagaggaacagcgcaaggatgaacgtcgtggagattactacggcaaagacaccttcaagaacagcaacaagaagaaacgccataacatttacatcttcagcctggaggatctggacaatgatgacattatcagtatggtggaaacgacccctactttccaacgtaccaaaactgtgttggaaagtatccagtctaaagcaatagccgaagaagaggaaacattcaataacgatgccgaaaacggcggaataacgatcacattttaacaactaaaatagaaaagaaccatggatttatttgacgtaatcagcaacgatatcaaagaggctatgaaagccaaggacaaagtgaaactggaaactttgcgtaatgtgaaaaaattcttccttgaagcaaagacagcaccgggcgccaacgacactttgacggatgacgctgcattgaaaatcatgcagaaactggtaaaacaagggaaagattcagccgccatttaccaaggtcagggccgcgcagacttggctgaagccgaactggcccaagtggcagtgcttgaagcctatctgcccaaacaaatgagtaacgaagaactggaagccgctttgaaagaaataattgcagaagtgggtgccgccggtcctcaggatatgggtaaagtcatgggtgtcgccaccaaaaagttggcaggcaaagccgaaggacgtgccatctcggctaaagtgaaagaattactgggataatactccggcaatccatattcgagaaacgaaacttctgccccgattcatctttacgggcagaagtttcgttttttataaaatcagtgagaagcaaacgtatgcagtaccctatccagcttcccgtttatcattctcacttcaccaataccctggaattcaaagtatccttcagtgtgttcagccacaataaaaatctgatatacagcgcataaggctgacagtagttccttcagtgcgctgtcagcaccttcagccgccgcaacacccgcaccggaccgatgtccttgaccatcatgctaaaggacaagaatgagtcatacaatatcgtggtcaaaagattgcacctgctttccatcttaactttcaagacaggaagaatactcatttgcttccgtaagcattcggcctcgtgcgtgtttttttcccctcttttccttcctacctttgtggcttcattataatcttaatccattatgtgttcagtattagaattttctagcgaaagtgataaactacgtactctcttttccgagtctaaccattttgattctgttcttttcatatttgatggcggccgtcgttataaagtttcgtcttccagccttggtatccattcccctcaggacctacttctccctttaggtcttggccttttccgcagcagtcctttttggtcttattacctttatccccaaggttgtaatttccataaaggtattgacggtctttgtggcgaggtcatccgacacacgggttcctgcgtgtcagagcagagctgtcatatttttcccgaccgctcccgtagcaggttgcatatcctttatcggtgcgacgacgaataccgtctggaatgccgtcgtctgaatcgcggttctttcctcttgaaaaaggaggaacggaagaaggattttcttcaaatttcctggaatcgcctgaatgagctgcttactgttaaaaagtatcggaaaacagttgaaaagtaattccccattctataagccgtgcagttttattttgataactttgccacataataaaaagtggatgtacagtgaaagaaccggttattacccttactttggaagagtacgaagagttgcgcaaggaacatgaatgccttgaaaaggagcatgcggaacttcagagaaaatacgaagcctctttgcaggagtattcccgccaggtcgaagaaatctcggcctgtacagccgtcattgccgatctgagatggaaattggctgacttgacacgccgtttatggggtaaatccagtgaaaaacgtcatcttcccgaagatgccggccagctgagcatctgtttcgagtctccgtccgatgtcaatgacccggtagcggaagaacagaaaaccgctgggaaatccgtcacatcggagaatggctacaatcgtttccgtaaaagcttcacgaaaaagatcactccccacgcccgtaagcccatcgacccgtcccttccccgtgaggagattatcattcccatgccggaaggcctttcgttggagggagcgacgaagctgggagaggaagtgagcgaacagtatgctgtcagtcccgcccgattctatgtgaaacgcatcatccgtcctaaataccggctcgccgacggtcgtatcataaccgctcccatgcccgtaatggcacatccccacagcaatgcctcggaaagtgtactggcccacattgctaccgccaaatattacgaccacctgcctctgcacagacagctggatatctttgagcgtgaaggaatccatctgagtccttccaccgtaagtaactggatgatggctgccgcacagcgtctggaaccaatctataatgaacttcgtgaactggtcaaggacagctattacgtcatggccgatgagacaccccatcccgtacttgaaagcgaccggcccggtgctcttcaccgcgggtatatgtggaacttctatctgccccggttccatacccccttctttgaatatcacaagggccgtggcagcagcggaatagacacactgctggcaggacaggtccgggtggtacagagtgacggctttgcagtatatgacaagttcgacacgctacccggaaagttgcatctgtgctgctgggcacacgtcaggcgcaactttgtggaagcggaaggaaatgaccctcccagagcaaggcatgcacttggacaaataggcggactgtatgccgtggaggagaaaatcagaatggaacatctggaaggggaggcggtggtaaagcttcgccgggaaaaatcgtaccctattatcaaagaactggaaaaatggtgcaaggaggaatatggacatacggtcgataaatcgcctattgccaaggccatgttctatatgtacacacgctttgaacaactgtccggatatgtcaatgacgcacagttctgcattgacaataatccggtggagcgttctataaggccgttgactttaaacagaaaaaatacgctcttctccggatcacatgaggcagcacatgcagcggcaattttcttttcactgatgggatgctgtagggaaaataaggtgaacccaaaactatggatgcaggacgtgctgattagggtacaggagaaagaaagagaagagaaaaacgattacaccgatttactgccatttaattggaaaggataaacaggaaagctataataaagtcaaaagccagacatgcttcgtctggcttttgactttattataacttggagagaaacacgcacgaggccgaatgcttacttgcttcctggactcatttatcgtttcaccttagtgatgaagttgtttcactaggatgatgaaacttcatcactagagtgctaaagcttcctcactaaagtgaaacgataaataaaaaaaggcgtgaacatgaacacatccagatagaaaggatttcacgagaacaactctttcagcacatccagcgatttcagcaccggaaaatccggcagatgcaaacgatagtaatcattcataataaccagacagcggttacgctccagacggctcatagtaaaaagatgcattgtttcataattcatacgcattaaaaggttgatacgtgaagcctcctccggtttcaaaaaagcaccatgtaatggccggacagacacgaagcaggcattcagcatatcaaaaaagcatccttccctataatcctccgtattaggatacagaccgaggaaacgtgaaaaacgcatcagaaaaaccaaatgaaaattggagaaacttctgtcgcattcgtccagccaccggatagaatgctccaaataagcaaacaacggcccgttctccgcttcttcacgcaaagcacgatacagaaattccgccaagaacatggcaatggaagatttataaggatcgtatggcaacgtgcggaaaggataccacgacttcgcttcttttatacgatacaaattagacatcggacgataatccgcttcaaactctatcatggaaagcggctggaacaataccgtcttcaccgccgatttccgtgaacggggaacagacacaagaaaagaagcacggccattctcgcgcgtataaatatcaacgatattcgaagtatcattgtattttaaggtatgaagtacaattcccaccgtcttttgaagcatactctttctctcttttatatactaggtaatcgttgtccgcaatacgttttttgcttttccacacaaatatacgcatcgttggaacatacaaaaataggttttttagatgaaaatgcacgtatttacaaaaaaaatatgccgaatattttgtcaattcaaaaagagttcctacctttgcaaccgcaaaagagaaaaacactctccgaaagcaagccaagctaaggctcggcagaatcaaggctcggcccgttcgtctatcggttaggacgcaagattttcattcttgaaaggggggttcgattcccccacgggctacaaataaaaataataaaagaacaaaattaaagattagtcgaaatggcaaatcacaaatcatcattaaagagaatcagacaggaagagaagagaagacttcataacagatattatgcaaaaacaatgcgtaacactgttaaaaaacttcgtgcaactactgacaaggcagaagctgttgcaatgtatccgggcgttcagaagatgttggacaagcttgctaagaccaatatcatacacaagaacaaagccgctaacttgaagtcaaaattggctgcttacattagcaaactcgcttaagcaaagtcttaaactaaaagataaaataggcaggatttttcaatccggccttttgtctttttatgtgtttcataaaacacaagcaatacatattgcaaacgtaacatcgaaaaaatacgcaattcctcgctccgcggaaaacagccctgaagaatctgaagcattcatgaaggatttagaagagaatcatacatgataagatgctgataaaaagcctgttaagcgtcaatgaaggatttgaaggaaaaagaagccccattgatcttcagaagacttaccctcgaaataaatacatcactcccctacttttcccggcgttcacggacagacctcattccaaacccgtccaatcccctcttttttacgttttttagtccataaaagctgcctgtctcagcaatttttcgtatctttgaaagctaatatttaagataattgaatcaaacatgagtgaagaagaaaagataaacggcgaaaacaattactcggccagtaacatccaggtattggaaggtttggaggctgtacgtaaacgtcccgccatgtatatcggagacatcagcgaaaagggattgcaccacttggtttacgaggttgtggacaactctatcgacgaggcattggccggctactgtgatcatatagaagtcaccatcaatgaagacaactccattaccgtacaggataatggccgtggtatcccggtagactttcacgaaaaagaaaagaaatctgcattggaagtggtaatgaccgtgctgcacgcgggaggtaagttcgacaaaggttcttacaaggtttcaggcggtctgcacggtgtaggtgtttcttgtgtgaacgccttgtctactcacatgaccacacaggtattccgcggtggcaagatctaccagcaggaatacagctgcggacatcctttgtattctgtaaaagaagtaggaacagctgatattaccggaacaaaacagactttctggccggatgataccatcttcactgttaccgaatataagtttgacattctacaggcacgtatgcgtgaattggcctacttgaacaaaggtatcaccatttcactgaccgaccgccggatcaaagaagaagatggcagcttcaagaaagaaatattccattcggacgaaggagtgaaagagtttgtacgtttcctgaaccgtaacaacgaagcgctgattaatgatgtcatttatctgaataccgaaaaaaacaatacccccattgaatgtgccatcatgtacaatacaggctatcgtgaaagcctgcattcgtatgtaaacaatatcaatacaatagaaggcggcacacacgaggccggtttccgcagcgcattaacccgtgtactgaagaaatatgcggaagataccaaagcactggaaaaagcaaaagtcgagatttcgggagaggacttccgcgaaggcttgattgccgtcatttcagtgaaagtagccgagccgcagttcgaaggacagaccaagaccaagctgggcaatagcgaagtgagtggtgccgtgaaccaagctgtaggcgaagcgcttacatattatctggaagaacacccgaaagaagcaaaacagattgttgacaaagtgatcttggctgcaacagcgcgtatcgccgcacgcaaggcacgtgaatctgttcaaagaaagagtccgatgggcggtggcggactgccgggcaaactggccgactgctcgagccgtaatccggaggaatgtgaactattcctggtcgagggtgactcggcaggtggttctgccaagcaaggacgtagccgtgccttccaggcaattctacctttgaggggtaaaatcctgaatgtggaaaaagcgatgtggcacaaggcttttgaaagcgatgaggtcaataatatcatcaccgccctgggtgtccgtttcggtgtggacggaaatgatgacagcaaaaaagcgaacatcgacaagctgcgttatcacaaagtggtgatcatgaccgatgccgatgtcgatggttctcacatcgacacccttatcatgacattgttctaccgctatatgccggaaattatagaaaacggacatttgtacattgccaatccgccattgtataaatgcagcaaaggaaaaatcagtgaatactgctacaccgaagaagcacgccaggcattcattcaaaaatatggtgacggacaagaaaacggaatccatacacagcgatacaaaggtttgggtgagatgaatcccgaacaactgtgggaaacaacaatgaaccctgaaacgcgtattctgaaacaggtaacaattgacaatgccgccaacgtagactatatcttctccatgctgatgggagacgatgtagctccacgccgcgagttcatagagaaaaacgcgacatatgcgaatatagacgcgtaatttttcattcattattttttaatcaaaatccatcctcacatcttacaatttgaggtagccccgatcctgcttttctctggatcggggcttttttatcaatgaaaaccaacctgaccccatttatatttttcctcctttaaatgcccgaagaaacagatactcataccgactctttttttcgatgaaatgggcagaaattgtaatagttcaccgccggtaacaaacataacctcattcatttttcttataaattaattggatgaaagacgatattctgccagaaagtcttaattttgggacattaaaccatttaactcgaataataacatgaaactcacatttcgaattgaataccgtacagcctggggagaagaactgggggtgatactggacggaaacaatagtgaacctatcatccttcgcactccaaacggggaacattgggaaggtgaagctgaaatgccggacctccctgcatgcgtgcctgtttcctaccgctatggagtatatcgtgacggacagtgcatccgccgtgaaagcggaaccatggctcatttgttttgccccggaaaaaagaaaaactgccactacatattaaatgatttctggaaagaccttccggctgaatcttacttatacagttccgccttcagtggtgattatcagtctgagacaactataaaagtcacagcaagcgccgatggaagcattactttccgggccttatgcccttgtctgcatcataagcgtcaagtgctggctatcagcggagattgcccggctttaggcaattgggatattcaaaagacggtcctgatggaagaaatacaaccgaacgagtggaccatcacactgaatgtttctactttggagtttccgctaagttataagttcgtagcctgcaacgccgacagcaagcaggtagaggaatgggagaaccacgacaaccggatgcttaataatccggaattaaaaaaaggagaaatttacctgacaccggaaactgaagttcatttcacttcatcggcccgtaaggtggcgggaacagctatccctgtattttctctccgcagtgagaaaagttttggagtaggagatttcggagatttgaagaaactgatagactgggcggcaaagacccaccagcaagctgtacaaatcctccctatcaacgatacgaccattacccatacctggatggattcttatccctacaacagcatttccatttatgcattccaccctatgtatattgacctgaaccagctgggtaagatgaaggataaagaagcgctggctgtttttgaagcccgccggcaagaattgaacgctcttccccaaatagattatgaagcggtgaacaatgccaaacgttcctatttgaaagtgatgttccaacaaaccggaaggaaagtgctggcttcggccgaattcaaaaaattctttgaagaaaatgaacattggctgctgccatacgccgcattcagctatctaagagatctgtatggcactccggatttcagccaatggcctgagcatacagagtacaaggcagaagaaatagcagccttatgcgcaccggacagctcttgctatgaagaaatcgccttttactactacacacagtaccatttacatatccaattacttgatgcaggaaactatgcccgcgaaaaaggtattatctttaaaggtgatatccctatcggcatcagccgcaacagtgtggaggcatggattgagccgtattatttcaacatgaacggtcaggcaggcgcgccgcccgacgcattctccgtgaacggacagaactggggctttcccacctataattgggaggtaatggaacaagacaactaccaatggtggcagaagcgtttccgcaaaatggcagagtatttcacagcttaccgcatagaccatattcttggtttcttccgtatctgggaaatcccatctcattcggtacatggtttgctgggacagtttgtaccggcattgcctatgagtgtagacgaaattcaaagttacgggctgccgttccaaaaggacttcatgaccaaaccgttcatcaacgaagagatgctaaacaagatgtttggtgacaaagctgcctttgtaaaagaaacattcgtacaacatgctcacgatgacatttatgaaatgcgcccggaatatgatacccaacgcaaagtggaggcttatttctccgataagaaagatgaagaaagtatccatatacgcgagggagtatatgccttgataagcaatgtattatttgttcccgaccgcaagcacccctccatgtatcatccaagaattgccgttcagaatgatttcatcttcgggcgcctcgactggaaggagaaagacgctttcaaccgtctgtataatcattattattaccaacgccataaccagttctggtatcaggaagcgatgaaaaagctgcctatcctgacacaagccacttctatgctggtgtgcggagaggatttaggaatggttcccgactgtgtgccttgggtaatggaccagttgcaaatactcagcctggaaatccaacgtatgcccaagaatcccaaacacgagttcggtcacgtgtgggaatatccgtaccgctcggtctgtactatttccactcatgacatgtctactctgcggggatggtgggaagaagattatgaacagacctgccgctactacaaccatgtaatgggacactggggagaagttccggtttcagccccgggatgggtttgcgaggaaatagtacgccaccatctggaatgtccgtcattgctgtgcatcctgtcctttcaggactggttgtcaatagacgaagaaatccgctatcccgatgtgaacgcggaacgtatcaacgtacctgccaatccaagacattactggagatatcgtatgcatctcactttggaagaactgataaagaacaagaagttcaatgaaaagctggtagagatgattgacaccaccggcagattctaaccatccaccacagacagcctggggctgtctgtggtgactccctaccccaacgataatcaataacacacataccatgaaaaaaattcccgatttaggtttctggaaactatggaatattagtttcggattctttggcgtgcagatagcctacgctttgcaaagcgcgaatatcagccgtatcttttccactttgggagcagacccacacagtttaagctatttttggatattacctccgctggcaggaatcatcgtccaacccatcataggcgcactgagtgaccgcacttggatgcgtttcggacggcgtatcccctatctgtttgcaggagctctggttgctgtctgcgtcatgtgcctgctccctaatgcaggtagtttcggaatgacagtcagtgcagctatggtattcggtctgatatcactgatgttccttgatacctctatcaatatggccatgcagcccttcaagatgatggtgggcgatatggtgaatgaaaaacaaaaaggactggcttactccattcagagttttctctgtaatgccggcagtctggcaggatatcttttcccgtttatttttgccgccatcggcatcagtaatattgctcccaaaggtattattcccgactctgtcatctattctttctacatcggcgcattgatactgattctatgcgtgatctatacttcggccaaagtaaaggaatttcctcccgaagaatatgcagcatatcatggcatcacccatgaaagcaaaaaagaaaagacaaatatgttcaaattgctggtcaaggctcccaaagccttttggacagtaggactggtacaatttttctgctgggcagccttcatgttcatgtggacttacaccaatggaacagttgctttgaatgtgttcgacacaccggtcataacaaccatgacaaacggtgtttccagagtggtactggatacacaatccgcacaataccagacagcgggagattgggtcgggatcttatttgctgtccaagccattggttccgttatttgggcaacgatcatcccgatgattcagaaccgcaaacttgcctacgtactcagtctggtattgggaggcattggattcatctccattttctttatccataatcaatatgctttatttgcatccttcatcctgataggttgcgcatgggcagccatgctggcccttccctttaccattctgaccaatgcattaacaggaggacatatgggaacctatctgggattattcaatggaactatttgtgttccacagattgtcgcagcttctttaggaggtatcgtactgaagatgtttaccagtccgggtagtgtcgctccggaagtaaacatgctgatattggctggagtgttcctgattatcggtgccggctgtgtaagtattatcaaagagaggtaaagcgtttcccgaaagtaatatatgctcattccatcaccaccgttcaatgttctgtttcccgaaactgaaattcactccgcggtgtcaaaactttgtttttgaaaacatgaacttataatctgaaatttgagcatcctaaaagactaaagaaaggatcgtatcattactcaatacagagtttgatacgacccttttacgcgttataattactatctgtaacttttcaaagctgtcattttggttttgacacattcatcttcattccgtccagcattattccaacttctccatgaattctggatgccgatagaaaaaatcatacgccatataataaagtacaaagcggtactcatttctgacacatgagttacattctgcgcccaagtatataataaaacgaagagataaataattgatttttacctgtttaggctacaaaatacaagataggtttttatatatctcttagtaagagatatataattctcgtgcaaaaataaggaaagttttgataactaatacacttttcattaaaaaaatacgatctaaagcaaaaaaaagccttttttcttatttaatctttctctcaacagcccacttctcactgatttaattatttgattttatgcatattacatctattttgtcgatctcttactaagagatcgacaaaataagcaaataaaaaaacgaaaaaagaattgaatggaatacctgtttctgcgacgtaaaaagacccgctacacttcggtgcgccaaaagactttgctctatcgtgccgcctctcgccgatgggagaaggagtttgcgttgcggacggacgtccgccggatagacgctcttatatataaaggtatattatacctgatggaagtgcgtcaagtattcctcgattcctctctttcgctgaagacactgagtgcgatgctggagacaaaccagacttatttaagtaatgtggtgaaccgctatttcggctgtaacctgaaagaactagtaaacacttaccgagtggaatacgccaaagagctgctccgcagcggacgatgccccatagaggaagttcccgtacgcagcggcttcggttcgaaaagccctttctatgtggcgttcggaaaagtgacgggcatgacgccccggcagtatgtggcacacgagaggaatccgctgaaacaggaggaaaacaattaagcccttttataataaatggtatgtataaccaattttagttttttaaatttataaatttaaagtttttctattatgaacaaaaagtttttaagtgcaatcctgttcggagccttaatggtttcgtcaacaggaacatttgtgtcttgtaaagactacgatgatgacattgacgagctgacttcgcgcgtggatggcgttgaaggtcaaatcaaagacctggaagcaaaaatcaatgctgccaactggattacttctgtaactcctgccacaggcggtttcactgttgctttcaatgacggtagcagctacaccattaccaacggtaaggacggtgaagcaggtgctgcaggtacagaatggactatctcggaagatggtttttgggtatgcaacggtgagaagactaccgttaaagctgtaggccaggacggcgcacagggtgaaccgggcaaggatgctcaacctgaagtgaaaaaggaaaacggcaagtggtatttgtggaacggtacagaatttgaagaatttgccggcgctactcctgcaacaaatgttccttactactacgctgatcctactgatcctaacaactacgttatcatggttgtttgtgacaaagacggtaagaatgaaaaatctgttcgtctgcccttgaacgaaggattggctcagattactgtattggaaaacaatttcaatattgcttatagcattgctaaagaaggaacagcatggccgaaatgggaaggtggttctaaagaaaaacctgccaaaggtgaatatatggtaggacaatctaccagttctattatagttcagatatccccggtttcttacgattaatcaggaaaaaccgttaaggctgtaaactctaaaggtgaagaactgcctatcaaattaggaaaagtagttccttttagtggagtattaagcagcagcagagcagcttctacaaccggattgtatgaaattcctgtagaaggtattactgttaatgatgaaatagttgaatcatacggcaatagcaatgctgtagcgtcattggttgttaacgaaaatgtttactctccattcaatggtgattttaattttagtttggtggatgcccaagatgttaatattccattcggtaaataccagattaatgagcaaggtgatacttatctcacatcatacgtggatgctaagccaggtgaatctgtaacaattgtccctgaaaaaaaatgggcaggtcaactattcgattcatacatcacaatggctgataatgctcaagcaaaagcagactctatccgttatggcgtatcattcgatggtatgactatcaatcttaatgacaaggctgcaggaaatgtttactttacagttcattatatgaatgttttcggtaaggttaaatctgacaatgtaaccttgaactttaatgaaaaaactcctgatgcagaagaaattacttctatcgtaagcaagaagcatgttgtaacagaagtgactgaaactgctgaacaagcatttatctctgacttaaagccctacttcgatgccatgggtgcagacaaacgtgtcgtttggaatgctgaatatcaagaaatggtacttgaaccccaagtagaatgggtatatgaaaatgctgaaacaggcaagatagaaactgaaaatctaaccgatcttgttaagaatatcgctactgttgactctgaaggtaaaacaacaactgaagcagcccaaatagcaggtatcaaagttaacttcaacacaaattacggtagtcaattagccaaaatcattgaaaatggtggtgagtttacagctaaggtaaatgttgttgcagctgttaaaattggaacactcaattatttcagaacaattgctgttattaacttgccgttcactattgaaaagccaagcgatgcaacattggcagcagcttatacatttaacccgtcatactatttgaataagattgtaacagtttatgctagtgaaatcactaaagccaacattttctctgctggaactgtaagtggatacaaagctattgaagatgatgctgacaagattgctgttagtgacaacggtactatcacattaactgaaaaaggggaaactaacaaggcttatacgttaacaggtggtaaggttacctatgcaggcgtacagttcccgattgctgacttcaaagttatgtttgctgaaagcaaaaactatacaacagttatgcctgctggtatttctatcatctctggtagtggtaacatagtaactgtgaaatatggtaaagctgctgataagaatgacaagaacatctattaccgtgtagataacatttctggaacacaagatgatattcaaaatgtagtttgcgaagtcgaagctaaatatacccaatatttgacagcaaatataaacggtaaagatattaaacttacagcaaatgctggtgatgcaaacaaagtatctgtagcaaccccagtcaaagtgaaattgactatcactacttcaacaaatgaaaaagtagaagacaccattactgtaaacctgactccctatccggcacagtaatcaaagtctaaacacacagagataaggatttaatatcctcctctctgtagaactactcccaagcagagagagaattattttgagttattcaactctcattctctctctgcttttttatttatgccaaacaatcagtactatgtccaataatttttatcaggcattcaatagcatcagcgattcgatgacaaaaaccgttcctaaagaaatcaaaatgacaaatgaggtcgtatttacagaatccactccattgatttccaaagatatttatcgcacctaccgacattgccgcaatattgaaataagccacctatggcaatactctatctctcctattacatttatagtattttgtctttcagcctatggttatctacctgtatagatatgctatcaatgttactattttctaccaaaacatctccgaagatacgctgaacacttattggaagtttactagttgtggtgctatttttatctctcacataggtactgtactctctgttttatgaatttaatggtcgaagattcaaagacatggtttgaaatttatgaagttgccattgctgtttatgaagaaaatgacaagtacctgaacaaaatagaaaataataataacgaggacaaaataggtgctttccaatttcaacaattagaaagtttcgagaccaagttaactgaaaagatattcgacttgcctatcctcaatgtccaaggcgggacttatccatcttctaaaatcaattgtgttattggacaagtaatgctatccgtttggggaacaattacattttgccacatttagaataaatacgaccaaactcccaaggttagagctaatacttactgaagcacggaataacagtgaatacacttatattacatttgctggtattattgtaatcatatctctacaagttcatcacttcctgttcaaaagtttccttgtttcctatcgccttattacgcatcttgctgcgataattataaatcgttgccaaagaataccccaagaaatgggcaatccgattactatcagtcactcccagacggatcaaagcaaatatacgcaattccgtagtcagcaactcgcccgatttgggatatattcttccttcctctaccaataactcattaaaagaagtaatgaaatgaggaaataactccaggaaagacttatcaaactcattataaaaatccttccgttcatctcgtatgaactgctcggatttaatcgctttaaacaaatcgtctatacgggaggccattgccagtttcgccaaagaacgacgataaaactccaacttgtccagataaatcacacatctgtccaaataacgggcaatgtatacttccttgatcttccccgtctgtgccaactcagcatttacttcctgcatctgctgattagccagactcagattacggcgcatcactgataatttcttcatccatcggtacagataaaaaatagcagcaagcaaaaataaagaaagcaaactgacactgattaaaagagtacgggaaatctgcctctctttttcttctttcaatttatatgctttatcaataataggaaagaactgcgttacctcaataaaccgcaaacgggcattacaagctaccgcatcctccattgaacaattcaaatacttataagcacgatccaaatcacctacctcatacatcagttgagccaatttctgtaaggatgcatattcacgaatagacgatttcaaatctgtaatagcggtcaaggccagataataaatttctttctgaatatctccccgcatatcgtaagcctcggataaagtataataaatataccctttttgccgttcatccggcgtttctttcaataggtccgacaatataaccaaagcagaatccaccctgccattaataatctttttctcggcccatacaatgctcctgtccacacaaggatcagtagcaataagaatagaatccctgtaagcatcggtctttttcaaatatttcactttttcggcatcattggtggtataatcggccacccaaccataataagcccgataggtccggtaataataagccaaagtctcccgttccaattccaacgggtctacccgctccaattgttccaaagcctcgttatacattcccatcacccccatcacctcggcacggttaatgacaatctcattctttaactccggatgattcaacagaggcaacaaattcatttttccattaatataatacaatgcggaatcagcttgataatgcagataagcgttaaacaaagaaccgcaaagttcatatttctccctattatctttagaacggtgaagacgttgctttaaatccacaatctctttttccttctgtacatgacaagcggtcttattatctatgacccgatccaaccttttcaacacttcttcattgctgtttttatcagcaaacaaaggagttgtcaaagtcaacaaaaacaatataaagaaataggttacattcttcatcttatatacttattatagattcacaaatatataaatataagtaattagaataaagtttttcaacgaaaatattttcattgacgtttatattttcagcaatacagcaaagacaaatgcgcctaattatcaataagttgaatctataaaacatttatatttttattctagtactcaaatctcagctattccactcctacatttgcaacatccaaatgaaatgaagatataaacactaatttctatatattatgaaaagaacattcgcacttatggcattactcgcgttattcggtttgcaacacacagtgtccgcagccataattaaaaaagtagccccaaccttctggtgggcggatatgaagaatcccgaactacagatcctactgtatggcgacaatatttcctccagtgatgtaagcatctcttctaaagacattcttctgaaagatgttgtgaaacaagaaaatcccaattacttaatcttatatatggatttatcggaagctactccgcagacttttcatattacactgaaacaaggtaaaaagcaaactgttgtgccatatgaaataaaacagcgtaaggcagatgcttccaacgtggaaggcttcaactcgggtgacgtattatatctgattatgccagaccgcttcgccaacggaaatccctcgaacgatgtcgtaccggaaatgttggaagcaaaggtagaccgtaacgatccgttcgcccgtcacgggggcgacctcgcaggtattgaaaataatctggattatctctccaacttgggagttacggcaatctggctgaaccccatacaggaaaatgacatgaaagaaggatcctatcatggctatgccattaccgattattatcaagtagaccgcagattaggtagcaatgaagaattctgcaagctggtagaacaagcacacagcaaaggaatgaaagttgttatggacatgattttcaaccattgtggcagcgaaaactatcttttcaaagatatgccttccaaagactggttcaattttaaaggaaactacacacaaacttcttataaaacagcgagtgtacaggatatccacgcttctgattatgaacgcaagatagccgtagacggatggtttacagaatcaatgcccgacttgaaccaacgcaaccgccatgtagcccgctatttgatccaaagcagtatctggtggatagaatatgcagggattaacggcatccgtcaagacacacatccttacgcagatttcgacatgatgtcagaatggtgtaaagccgtgaccgatgagtaccctgatttcaacatagtaggtgaaacttggttgaacagtaatgtgctggtttctttctggcagaaagacagcagactggctgctcccagaaactccaatctccgtaccgtgatggatttcccgctgatggaacaaatgaacaaagcctttgacgaagaaacaactgactggaacggcggattatatcgtctttacgattatcttactcaggatttggtatatgcagatccgatgaatctgctcgttttccttgataaccatgatacttcacgcttttatttaaatgaagaagccacgcaaaatattgaccgctacaaacaagcacttgtattcctgctgaccacacgtggcattccccagatttattatgggacagaaattctgatggctgcagataaagccaatggcgacggtctgttacgttgtgatttccccggaggttggaaaaatgacccacgcaactgtttcaatgaggctaaccgtactccgcagcaaaatgaagcctttacttatatgcagaaattactccaatggagaaaagggaatgaagtcatagccaaaggcagattgaaacacttcgctcccaacaaagggatttacgtttatgaacgaaaatacggaaacaaatcgataacggttctcatgaatggaacagacaaaacgcaaaccataaacctgactccatacaaagaagtacttccaacaacatcagcccatgatgttttaacggatcaaaatatcgacttgaataaaaacctaacacttccggggcgtggaatgctagttttagaattttaaaacaaccagtaaaagcttataatttaataccagtacatattatgaatttaaaaaagaatctttcacttatcgcatttctctgtatctcattcattgcaaatgcacaacaaaaactgaactctccggatggtaatctggagatgacatttactctagatggtcagggcactcccacgtatgaactgacctataaacaaaaggaagttatcaaacccagtaaattggggttggaattaaaaaaagaagacgcaaacgccaaaaccgacttcgaatggactgataaaaaagacatagacaaactggacatcaagacaaacctttataacggtttcgagataaaggatgtccggacatctaccaacgatgaaacatggcagccggtatggggagaagaaaaggaaatccgtaaccattataatgaattggcggtcacattgaaccagcctgccaatgacagatttataatcatccgtttccgcctgttcaacgacggtctgggcttccgctatgaatttccgcagcagaagaacttgaactatttcgtgatcaaagaagaacattcacaatttgccatggcaggtgaccacaccgcttactggattccgggagattatgacacacaggaatatgactataccgtttcccgcctgtcggaaatcagaggattgttttcaaaggcttatacggagaactcctcgcaaaccgcattcagccccaccggtgtacaaactgccctgatgatgaaaacagacgacggtctgtacatcaatctgcacgaagcagctttgatagactatgcctgcatgcacctcaacctggatgacaagaacatgattttcgaatcatggctgactccggacgcacaaggtgacaaaggatatatgcagactccctgcacttcaccgtggcgtaccgtcatcgtcagtgatgatgcccgcaacattcttgcctcacgcattacgttaaacctgaacgaaccttgcaaaatagcagacacttcctggatcaagcctgtgaaatacatcggtgtgtggtgggatatgattacgggaaaaggctcatgggcttacacggacgacttatccagtgtaaaactgggtgaaacagattacaacaaaacaaaacctaacggcaaacactctgccaacactgccaacgtaaaacgttacattgattttgcagcagagcatggattcgaccaagtattggtagaaggctggaatgaaggttgggaagactggttcggaaaaagcaaagattatgtgtttgattttgtaactccctatcccgacttcaatgtgaaagaacttcaaagctacgctgcaagcaaaggcgtaaaactgatgatgcatcatgaaacttcagcttctgtacgtaactatgaacgccacatggatcaggcataccaattcatggtagacaacggatataattctgtaaaaagtggctatgtaggcaacattattccacgtggcgaacaccactatggacaatggatggataaccactatctgtatgcggtgaaaaaagcagcggactacaaaatcatggtaaacgcccacgaagctgtacgccctaccggaatatgccgcacctatcccaacctgatcggtaacgaatcggcacgcggaactgaatatgaatcatttggcggtaacaacgtaaaccatactaccatcttgcctttcacacgattaataggtggtccgatggactacactccgggtatctttgaaacccgctgtaacaaaatgaatcctaccaacaattcacaggtacgttctactttggcacgccaactggccctgtatgtaacaatgtacagcccattacaaatggctgccgacatacctgaaaactatgaacgcttcatggatgccttccaattcataaaagatgtagccattgactgggatgaaaccaaatatctggaagccgaaccgggagactatattaccattgcccgcaaagctaaaggaaccaacgactggtatatcggctgtacggcagacgagaacggtcattcttcaaaactgatatttgatttccttgatccggacaaaaaatacatcgcaactgtatatgcagacgcaaaagatgccgactggaaagataatccacaggcatataccatccgtaaaggcattgtgaccaacaaaagcaaactgaacttacacgcagcaagcggtggtggttatgcaatcagcattaaagaggtaaaagataaagcagaattaaaaggcatcaagaggttatagaaagtgatcttttgacaaacagttaacattaatcctcataaaatgtagccgaatgagccttgaacagttcacatatagttatatttttaagataagccaaccagtatattatactatgaatcaattatatatgatttgcactagcactaaatcatttatatttttattcttatctcaaaaatcgctttataagaccgctacatttgtaacaaacaaaacaaaaagtaagtgaggatgatggttagctaaagcagccgccaatcattctaaaaggtaaaaacatacattataacagagattgattagaaaatcaggttgtttgggaaaacagttttcaataggtattttttaactgagaatataaacttgaaataattatttaactttaaatttaaagacatgaaaagaaacttgatgttcaaggtcctactaatgttaatggtaggatgcttcttgtccatagacgcatttgcccagcaaatgactgttaaaggacttgtaaaggacacaacaggcgaaccaattatcggtgccaatgttgtggtaaaaggaacaaccaatggtactatcactgattttgacggtaacttcctgttaaacgccaataaaggtgatataattgttatttcgtttatcggatacctgacccaggaacttccggctgctacttcactaaatgtgatactgaaagatgatacggaaactttggaagaagtagtcgttatcggttatggtgtggctaaaaagaatgacctgaccggttcggtaacagccatgaaaccggatggaaagaacaaaggcttagtaataaacgcacaggatatgatttctgggaaaatagccggtgtcaatgtaacaagtaatgatggtgccccaggcagtggcgcccagattcgtatacgtggcggttcttcactgaacgcatctaatgaccctctaattgttattgatggtatggctatggacaatgagggagtaaaaggcctctctaacaaactagccatgattaatccgcaggatatcgaatcattcaacgtattaaaagacgcttcagccactgctatctacggttcacgcggctcaaacggtgttatcatcatcactactaaaaagggacgcaaagggcaaaagccttcagtttcctattcaggtagtgtcacattgagtcagaaaaaaggaacagttgatgtacttgacagcaaccaataccgtcaacttatcaccgatttatacggagaaaacagcgatgcttatcgtgccatgggtacagccaacaccgactggcaagatcttatttaccgtaccgctctcagtcatgaccacaatataaccgtatcgggtgcagtaaaagaccttccttatcgtgtatctgtaggtttcaccaatcaagaaggtatcttgaaaaattctgatttcaaacgtgtcacagctgcattgaatcttaatccgtctttttttgacgatcatttgactatgaacctcaatgcgaaaggaatgtacgcacgttctgcatatgccgacggtggagccgtaggtgctgctgtaaaaatggaccctacccaagatccttataatttcacatccgaatatcacaaagcccaattcggcaatgcattggatcagacattacaaaattatgggggatttttccaatggtcatcagccgcatcattaggcgactccacatggccgttcatctataacagcacggcagaatgtgccaacccattagccatgcttgcttttaacacagaagttgcccacagccgcgcctttgtgggaagtgccgatatcgactataaagtacatggtcttgaagaccttcgccttcatttatctctaggtgccgatgtttccaaaggacgccaagcacagaataaatctactgcttcccctagtgccatgtattatggttctgttggaggtgaaagtatcctaaaacgcaacctttcattgaatgcatacgcccaatattataaagactttaatgataaccaccattttgatattatgggaggttacgaatggcaacatttttggaaaagcacaaacagtgactacgtaggtcgttatccgatgacgaacgatgaccccacattagccggcacagagcgtcctcacactccgtatcaatacaagaccgacagttatttggtttccttcttcggacgtgccaactacatacttatgaaccgttactatcttacagctaccgttcgcgatgatggaacttcacgcttcaaagaccattgggcgtggttcccgtctgtagccttagcttggaaagcaaaagaagaaaacttcctaaaagacatatcttggatatctgacttgaaacttcgcttaggctggggcatgacaggtcaacaggcaggagaaaaaattaacaattataactggattcccacatactcagtaagcacaggtactaacggtttttatccactgataggtaacggaaccctataccgcccggacaactatactcctgatttaaaatgggaaaccactactacctataatattggggttgattttggtattatgaatcaacggctgacagccagtattgatgcttattaccgtaaaaccgaagatttgctgaactatgcaccattagcgtccatggctggctatagaaatcaagcatggcaaaatatcggttcgttggaaaataaaggcatcgaatttgccttagactggaaacccattgtaaacaatgacttaatatggactattaattataaccttacttataataagaatgagattaccgatctaagtggtgtatccgatagtggtgctcctgtagccaataccgatatcaaagtaggtcaaggttcgggtttttatctgcaatacaatcaagtagggtatccagctaattcattctatgtataccaacaagtatatgacccacaaggcaacccgatagaaaatgcagtagtagaccgggacggtgacggtaagattaccgaaaatgacaaatacctttataaaaatgctgctcccgacgtaactatggggctttcctcccgcctggaatacaaaaattgggacttcggattctcactgcgtgccagtctaggtaactatgtttatgatggaatcaacgccggatggagcaacatgaatcctggtgaagtatggtccaactctttgaattacctgtctaaccgtccggtagacgctgtagccagaaattggcaaacttacgaaattaccgccaaagcttcggactactgggtgcgtaacgcctcattcttgaagtgtgacaacatcactttaggatacagcttttccaatctcttcaagaacggaagctatcgcggtttgaatggacgcgtatatggaaccgtatcgaatgttttcaccatttcaaactatgatggcatcgaccccgaaatcaataacggattcgataacaatctctatccgcgtcctatctcatttattattggtcttaacctgaatttctaattcgcaaaattatgcagtatatgaaaaaatacataaagaatatcgttcctgccacattcatgatgttggctttgggggcaacctcatgtatcggagacttagatgtagatcctatcgatccgaacatcgataccaatgttgatttaaacggattgttcaacaagtgctacgccaatatggcattagccggaaacggtggtgctaacggtgactgtgatattgacggtttggatggtggtacgacaggctttatccgccaattgttcaattccaacgaactgaccactgatgaagctatctgcggctggggagatgaaggtgtagccagtttctgctacaatacttacaatgcttcccatcctatgttaaacgggttctatgcccgtctgactaccggcatcacctattgtaaccaatatctggctatggctggagatacagatgccaccatgtctgccgaaatccgctttgtacgtgccctacactacttcttactgatggatggttggggaaacataccctttacattggaaccaatgaccaaacctgaacaaagatccagagctcaaatgtatgaatggcttgaacaggaactgatcggaatagaaccggccctttccgaagcaaaagcaaaaaaatcgacagatgccggttatggtcgtgtagacaaagctgcctgctggctgttgctctcacgcctgtacttgaattcggaaatttatacaggaacggcccaatggcaaaaagcaaaagaatatgccgacaaagtaataaaatcctcctaccggctcaatactgtgggaaaaggcggatggactgcctatcaaatgttattcatgggtgacaacggggaaactgatgctgcttacgaagctcttctacccttacttcaagacggtctgacaaccaccagttggggtacttccctgttcttgatagctggttgctttgatggtgagatgcatgcaaaccctaatgacctgacagccaccaacggtgtttctgcacaaaactggggcggtaaccgcgcacgtcctgacctcatccgcaaattcttccctcagaatgatgcccccgaactgccaagctacgacatgtatgtagcagccaaagacgaccgtgctttattcgacggtgtgggacgtaccttaaacaatgaagatgtatctacctttaaaagcggttatgctattgcaaaattcaccaacttcaaaacagacggttcagccggacatgatgccaccttcgccgataccgactacttcttgctacgtgttgcagaagcctatctgacttttgcagaagccgatgctcgcttgaatggaggaaacactacatctgaaggtacacaagcagttaactccatccgaagtcgtgcacatgcttctacccgtacaaatgcatatagcctggatgatatttgcgatgaatggagccgagaattctattttgaaggccgccgccgtatggacttaattagattcaaccgctatggaggcaacaacaattacacttggcaatggaaaggcggatcttatgaaggacgtagttttgatgcacatcttaatatttttgccatcccgaccaatgagttgactgccaactccaatttgactcagaacccgggatactgaaaactttttgttttataaatattaaatgaaaatacaatgaataaaatacttaaatcatttttgattatcggattgggactgggtatattcaccgcatgtgatgatgatcgcgactccaacccaacgctaatctcacccaccgaatttgtcctaaacactccagctatcagcggtacagtaatcgatttggccaattcttcctctatcgaaatatcctgttcacaacccgactacggcttccccgccaacgttggatactatgtgcaagtggcattcgatgaatccatgaccgattttacagaaataggtaatgtcaatgcaggaacaaaaatcagtatagacgcacctcttttagctagtacacttacagatatgaaagtaaacaaaggtgcaaccgatgttgattttccgatggatatagcggtctatatccgcttgagagcagttatgatgaccagtgataacaaagcaatagaaggaaccgaaatactttccaatgtagtgtcattgaataaagtacatttacttttctcgcttcctccggtcaatacccccgaaaacttatatatcgtaggcggatttaacgaatggaactgggattcggcaaccaagatgattcccgtaaacggtgcaactcatgtattctggtctatggtatggatagacgatgccggcatcaaattcaatcagagcaaagcttgggatggaaatgaaacaggattttctggtataaacagtataaacggcgatttggcaggcaatatcaaagacaacggagacaatatcgctactgatactccgggatggtacttaatggtaatcacctcttccgtttcgggacgcaacctcgtctatgatatacagtttaacaaacctgaaatatggttgatgggacctgttgtaggcaacagcgactggaaagagcaggctgaaggctggttatgtaccattcccgatacttttaacgcttcttttgtctcacctgcttttgctgccagtgtcccgggtggcgatggtgacggtgtgcgtgcatacgtaaaaattcctacctttgagtggtggaagagcgagttcatggtcttcgacggcaaaattgaatatcgtgccaacgatggagaccaagcacgagtagcaggcaaagcgggacagcagctctacctgaacttcgctaccggcgaaggcgaaatcaaataataatctttttaattgaatcaagatgaaaaatatatcaatccattcattaatcggtctgactgttctgtgcatgtcttcatgcacagatgattacactgattgggcaactcctcaagccaacgaacaagaagctgcaataacccttcccgatttctcggcatccaaggtcgatgacatcaatttatccaatccggggagcagcatcaaattgttcactctatctaatgccacacttcccgaaggatataccttgggcaatgtacgggtagagctctctaccgagaaaggtaaggcaggagaactggaatccaatacagacggaatgattgacagcctgaccattcagaagctggtagtggaaacttacgggaaacgtcctatagcgcgtcccttcattgcccaagtatatgccaatgccataaaagacggacaagccttattggtaaatgccggttcgtttgacgtaaatttcactccggccgcaccatttattgacaccggttactatcttgtaggcgacatgttcacaataaagaacgacaaggatgaaacctcggtaaatggttggagcgctgacggcatggtgggattcagccattcgggaacagacgtttatgaagattccaaattttccatcgtattcaccacaaccgctgataatcaatgctggaaaattattccgaagaccaataccgagggagaattctggggagctggtgtattgggaaccgtaaccgatggagataccgctaccgaaggaacacttacaacaaacaatccacaagccggcatgataactcaagccggcatgtatagaatgacattggatatgatggaatacacctacacactggaagagctggggttcgctccttacatctatgaaataggtaataacacctcatggtcaggtacttgcccgctagccggaataaactttgatggcaaatacagaggtttcgcctatttgaacggagaattcaaatacaagccgaacccagaaaaagataactggacaggcgattgggaaaaagtaagtggtgatgctctggcaggtacacttgatgaaaacggtgcaggaaatatcgacgctccggaagcagggttctacatgatggaagtggatttgactgccatgacttacaagcataccctcatctcaactctcggagtgataggtagcgccaccccatccggatgggatgccgataccgacatgacttacaacgaagaagatggaagttggaatctgaccaccaacctaacggatggtgaaatcaaaatccgcgccaataatgactgggacatcaactggggtggttcgatagccgaaccgactttcaatgccggcaacatcgctgttacggccggaaactataccatcaggttcatccctcaatgcgacggcatgaacctgttgaccctaactaagaactaatcaatacaagtataggtacgcttcttgtatcctccccgtacctataccgacaaaaggcggtttacggcttgcggaatttccgtaatactgtactccgccttattcttttaccccttataaacaaagaaaccatgaaacgaatccatctctttctagtaggtatactattcctgctttgcttggtacctctgtcacaagcctgttctgacgattcgccggaaataccggttcctccgactcccgaaaaccctgatcctcctaccgccacttggaaaaatatcactgccgcccccgacaattgggatggtaccaagcgtgccgacatctcctatcaattattagtttactcctttgcagacaaagacggtgacaaatacggcgacctcaacggactcattgacaagctggattacatcaacagcctcggagtgacagccctctggctctcccccatccatcctgccatgtcctatcacggctatgatgtgacagaccataccaaagtcaatcccaaactaggtacagaggccgacttcgaccgcctcatcaccgaagcccacaagcgcaacataaaaatatacctggattatgtaatgaaccatacgggcaaagcccacccttggttcaaggaagccacctcatctactgataatctttatcgtagctactatctcttctcccaatctcctcaaacagagatagcagaaggaaaaatagccatgatacccaaagaagaatatgccgccaatgaatggttcgcaacctcctccgaagatacagaagtaaaaggcatctatacattcagcctcgactggagcaaagcctcgcaacccaccgtcacagtaacccgggccgaaaaagccgatgcggacaaccctgaccccggcacaaacggagccaaatacctttatttcggagaaggcatatgtaaaaaattctatgacaaagggaacaaccattatgaactgaccacagacttcgtgtcctcttggggatttctaatccgcactagtaacgatccttcttggcctgcaggaactaaatacggtgctacttctgcttcccacaaagtcactttgggaactgcattcactcttgataacaaaacagcggccgatattctgttcgattccatgaacttatggtattatcattcccagtttgccaccgactactttgccgacctcaactatggtgcggtggaacaagccacttcttcccctgcgtacatagccatggcaaacagtgccaaaggatggatagaccgaggtgtggacggactgcggctggatgctgtcaagcacatctaccacagtgctaccagcaacgaaaatccccgtttcctgaatatgttctacgaagacatgaacacttattacaagcaaaaaggacacacggacaatttctacatggtgggtgaagtactgtccgaatacaacgaagtagccccctattatgccggtctgcccgctttgttcgagttctctttctggtatcgtctggaatgggctctcaataatgccaccggatgttatttcaccaaagacatcctgaactataggcaagaatatgccgcctatcgtcccgggtacatcgcagcaaccaaactaagcaaccatgatgaagatcgtgcagcctccaagctaggtaaatctaccgccaaggagaaattagcagccgctgtcctgctcactactcccggctcaccttatatttattatggtgaagaactaggattatacggcaccaaagacaaaggagatgaatatgtacgcggacctatgttgtggggagacagttataccacccactataccgacaaaatagatgccacagtaagcacaaacatccccgatgtaaccaaacagacggcagaccatcagtcagtattgaatacctacttgatctttaccgcattgcgtaacacctatccagcgctggcccaaggaaccatgacccgtcatgctctgttcaacgaatcgggagagggagaaaaaaaatacaaaagtattgccgcctggtacatgactaaagatagcgagaaactattggttattcataattttggcaattctgaaatagagattcccttgacggacaggacggagaaagctatcgccgtatccggaaatgtacaggagaaggaagaccatggaaacttttatttaaaactagacggatatgcctccgttgtctatcttctaaaaaactaatatacgaaaacacatgaaagaaatatatcataacctcaagaattatatgctaaccgctttgctggtattatcctcgtcagcttgcggaagccacggcaacgaacagtccggaacagataattccgatacaccagcaccttccaaaaccagttttactcaaggagccgacatcagttgggtgagtgaaatggaaaaaaaagggttgaagttttacaatcatgaaggcatagaaaccgactgcttccaactgatgaaagagctgggcataaatgccatccgcctgcgcgtatgggtaaatcccaaagacagatggaacagtaaacaagacgttgtgaacaaagcccgacgagccaaagaacaaggtctggatgtcatggtagacttccattacagcgactcatgggctgatcccggacaacagttcaagcccaaggcatggatcggcaaatcagtagcggaactaaagacggccattgccgcccataccatcgacatcttgcaagcattaaaggcggaagacatatccccacgatgggtacaagtgggtaacgaaatccgtccaggaatgttgtgggatgagaatgtcgcactcagcggtgcattctatgatatccgagaatgtgatgtcaaaggcttaaacagtaccaatgagcgagtgaaatatccacaaaacacacaaaatctggccgagtttgtcaataccggctacgatgccgtaaaaaaaatcttcccccaaagtatcgttattgttcacatagacaatgcctgggacgacttaacttggtggttcaagcagttcaaagaagctggaggaaaattggatatgattggcctgtcacactatccacaaactcattccacaaaattatggcaagaaatgaacttgttagcattaaaacacatcagccaactagcaaagactttccaagtaaaagtcatgataaccgaaataggggtaaaacaaaatgattccgcttccgcccaagtccttgccgattttataaacaaagcccgagacatggaatcttgcgctggtgtatggtactgggaaccggaatgttacgaatggaacggatatgatatgggagcctttgacaaaaacggaaaacccacagccattatgaatgcattccaatcatctacaaaaagaaagtaaagataactcataatcttcctgttaataatcgataacctagaagcctaatatatgtatatatatgtatataggcttctaggactaaccgtgcaagagttaaaaagagtatcctaaagaaatccaaaacgtatttctggcaagacattcatgtcccgcaaacatccacgcaaaatccaaatgcacacctgcatattccactcctgccccggccgtagcataactggcatctcctttattcttatcaccataatgataaccgccacgcaacatgagatgctccatccatgcatattccgccccggcacttacatttaacgcctgtacatcatcgggggaaagcctgtaacccagatcagcggtcaaagtcaacctatgcattgatgcaaaaggcaagtcagcagcacctcctactttgaccattgcaggaagagcctctttagaggttaggtattttattttcggtccaagattactcgcatgaatcccgaccgaccaaccggcaccttcccaatcctttatctcacgcttatataatatccccaaatcaaaagccacagaactcgcaccgttgctatttcctatcttacccatatccgaatacagatatttaaaagtagcggaaaccgaaagattctttatgacctcgtatgcataacctgccgccacagctatttctttgggatgtattcccgaagcatcctcccctattccatccatctccggatagccgaaataacggaaacctaacagaatggcattgcgcttattaattttataaaaaccgcctaaactatgaagagagtatccagactcatagtcacgcatccacggggaataagtatacgtaaccccacctttgtgcatggcctccgataaagttgccgcaccattatggaaaacggcattatttaccctcgaaatcgccacaccggcacctcccatggctgcgctgcgtgcatcaaccggtatagtcagatagtttgccgctccggtattgacaggtccggaatcctcttgtccataagctttaataaaagttatgcctattataaacagatatagtcctattcgtttcatgtcctatttcattttatcaggattagtacttgataaatttctctctgatctccatcccgttcgctcggtacaccaatgtataatatccggcagaaagcttggttatgtccacagaatgcaaggaggcggcttcaagttccaaatgaagactcagcaccttattgccaatgccattatacaaagtcagttctccattaccagccatactgctgcttacactaaatatcagagtattatcagttacctgattggacttcaatgtaaaaggatgaagattagaaacatctatctttaaagcagctgtggcatccacgcatccgtgccccaactggccggtatacctcggattatattcatccaaatcgtatgcgctttgatagaggatttccttcagagtttccggtgtaaaacctttcttgcctaccccatacttctctatcaccagtgctgccacaccgctgaccagcggacacgccatagatgtaccggccagatattcataattaccggccagttttgtagtcgtactccatatccgcccatctccgttcaatgctcctccgggagcagaaatatccatatatgtaccataattggaataagaagcctttctataatcggcctcaatggctgcaaccgcaactaccttgtcataatcagccggcgccgctatcctggggtcagaagtattcgcattgcctgatgcaaacaatacaatccctcctttcattggacttccgtcaagttgctctccgttgttatcacatccggcatattttataaagtaatcaatggcttccttatgtacaggattaatatatgaagaggtattcctccccgttccgacagcgtatccccaactattctgactgataacagctccattatcagcaccatatttaatagcggcagcaataaacggatcagaagcgacttctcctccagtggaagtcagactttttaaaatttggcaactcatgagtttcaccccactgccgggagttccgttccctcctgcaatgctgctgatacctgtttcattattatttgtcgcaccaatagtacccgccacatgagttccgtgacgatgagggaccaaaattgcattatcatctacaaaattataaccatgtacatcatctatatacccattgccatcatcatctataccattctttggtatctcacccggattcgtccataaattatcctgcaaatcaggatgctcctgattaatgccgccatctacaaccgctacaataatagccggattcccattgtattgtttccacacatcaactaaacggatatccgcaccttccctctgccaggattctgtaccgggattatcaaaataccattgtttggataaatccggatcattgaacaaccactcccccactctgataccatacatatcccatactgtttccggccttgccctggaaactatcttaggaacaggaacagccatttcaataccatctagaaaagctacttcagcagctgcacgagtcgctgatgtgtctttggagaaccaaacattgtaccataaatgaagcccctccttacgagtacgttcttcaaatttgccggcgtagggaaacgtacgttccattctctctattttcaaagaagaggcagcccggtccaacaccttaattcctgtccttaccgtgttgccaatactccttatctgcacctcttctgtaggttcttctttcagtttcacataaatacaaccctgaagtgcatcttcatctgataaatcaaaaatcagctgattcccttccggtttatcggaaacagaaggaatttcttcttgatggcacgaggctatcaatataatcatcagaaaaaaaaggacagtctttttcattataatattctgtgttgttagttgaagtaattaattatttcacaaatatagcgtatttccccggtcttgcaatgaaaaggggaaacaacctcattgaaataaaaaggtaagccttttttcttgtatttttgtccggctgcgttcattgcttcaccttggtgaagaagcgatttcacttaggtaaacagccgttgtcacatgggtgaagcagttgcttcacccatgtgaaatatcaaacggaacggagtgaagatatgataaggaacatcaaaaaacgggaatagagtaaaccaacccgacagaaatacgttgcgtgtccggactcgtgcttcccaaagcctgcgcacgccgggtcaaatgatgccctttatataaaagatgggcaaagataagcagttcactattacgcatcgggaaatattccacacacgcctgcgcattccatgtagtacgataaagccctttctcaaaatgcccgtttgctttataaatgcctgccctctcataagcgcctttcaaataaagattccaattgggatgaacgcgatagtcaaagtttaccacggtactaaagtattccgcattctgcgccgtggacggagctgttaaaacaggaccttgcaaatcactgataatgcctttgctatccagcccttcacgagaatacattaaatcaatataagcaataacagggcctttctcataaatattacccgccgtaaaacaacaaagattcttaccttccgccagctgcccatatgaggccgcatatcgtaattgtaccgcgttatcaaagaagaacccgttccaattgactgttgacagaacaggaactttagctttttccactccttgcggcaaaccgtaaagataggtttcatcattttctccactacggttatttactacctgaagcaccaactcattggtggatgacagattgaatcttcccgccactcctgcctgataacaactgatgttatcattaaactcactatactcgcggactttgatggcattgacataatattcatagccacccaaagcgatatcttgttttccggcagtcaacgtgaatttatcagacattttccaattcaccaaagcatactcaatggaagaggacaaattatccaacgagtggggattgctgtatttattaaacgactgacggaaatgataagaaaattgtttactgaaagaacctaatatctccagttttacacgattcagtttaaaagaggcatcctctaaatctccttcaataaagttggcaactcccgaagtggagaattgcaggttcatgtgtgccgaaagattcggattgctattaggaaacaaacgtcccaccaaactacggatagaatcatccggactgattaacggctgttcttgcgccttcaaagtcaatacgacgcataataagatacagcatgacaagagtagtcttttcatggggtattttcgtagtattaaatttcggttaatgtaataaatcagggataataaaaccgaagatgcttaaatcattcctcttttcttcaattcttctgccgcaacctccagctctttataccattcttcaccaaatttccgcaccaacggttcctttaagaacttgtatacaggaaggttctctttttttcccaataacacggcggctttacatacatcccaacgatggtaattcaccgctttataagggccataatcacctatacggatgggataaagatgacaagagattggtttatagaaatcggtcttacctgcccggaaggctttctcgatggcacaataacaataccctttctcgtcataacaggtaaatacacaatctttctgattgacgatggaagttaccaaatcgccctcttcatctgtataaaccactccctgcttatcaatcaccgcccgtgcctcgggtgaaagctcgtcccaaataacaggaagcacctcttccagtttttccacttcatccaattccaccggtgcaccggcatctccctctatgcagcactcacctttgcaggcatcgagattacaaagaaatttctcacgaaacacatcaagggagattacaacatcatctatctgtatcatctcttattaaattaaaatgtcattccggacaaagtgacgaatccatgcttcattacagattcctcaccttgttcagaatgacaaataaatatactttctacattattttatcaaatcccttccggtcatgtcggcaggctggggcatacccaaaatgtgcaagatagaaggagcaacatctgccaatacaccattttccactttagcattcttgttctctgttacatatacaaatggaacagggttcaaagagtgagccgtattaggtgtaccatcttcattcagtgcatggtcggcattaccgtggtcggcaataatgattacttcataatcattagccttggcagcttccactgtatctttcacgcactcgtcaatagccttcactgctttttcaatagcgtcatagataccagtatgacctaccatatcaccattagcgtaattcacgacaatgaaatcgaatttctgggtcttgatggcttctaccaatttatccttcacttcataagcactcatctcaggcttcaagtcgtaagtagccactttcggagatggaaccaagatacgctcttcggcatcatacggagtttcacgaccaccattgaagaagaaagtcacgtgagcatacttttccgtttctgcaatgtgtaactgagtcttaccgttagcagccagatattcacccaacgtattttgaacattttccttgtcgaacagaatatgaacacccttgaaagacgcatcatacggagtcatgcaataaaactgcaagcccggaatagtatgcataccttgttccggcatatcctgttgagtcagcacaacagtcaattccttggcacggtcgttacggtagttgaagaagataaccacatcaccttctttgatggtaccgtctacggtagaattattgatcggtttgatgaattcatctgtaacaccttcatcgtatgattcctgcatagcctgaaccatatcggtggcttgctttcctttaccttcaaccaacaggtcgtatgcttctttcacacgttcccaacgcttgtcacgatccatagcatagaagcgaccaacgatagaagcgattttaccggctgatttttcacagtgcgcagtcagttgttcgataaagcctttaccactcttcgggtctgtgtcacgaccatccataaagcagtggataaatgtattttcaatgccatattctttagagatatcgcaaagtttgaacaaatgatcgaatgaactgtgtacaccaccgtttgaagtcaatcccataaagtggatgttcttgccattttcctttgcgtaagagaaagcggaaacaatctcgggattcttcattatgctgttgtcggcacatgcacggttaatctttaccaaatcctgataaacgatacgtcctgcaccgatattcaagtgtcctacttcggagttacccatctgtccgtcgggcaaaccaacgttctcaccgctagcctgcaattcagagtgcggatagtttgccaacagagaatcccagtaaggagtgggagtgttaaagattacatcgtctttaccttgatcgccgataccccaaccatcaagaatcattaaaagggcttttttactcataatcttattttgtttaaagtttatccttgctttttccgggtgcaaaggtacaaaaaagccctgtcaatgaataatgtttcacctattttttatagaggaagttcgatgataaaatgcagtccgtctttaaattccatatcccgagtcaattttgcattcatacgcccggcaatcatttcacaaaccagcaaaacaatatccggcgcaccggcaagacacgactccctccctttgttctgtaatgcggttaatatacttcggcaaatactctaattatattatttgattagtacgtactacacattcttccggaaatcgatatagaagcttcgattcttgtgttataaaacataccttttcatcttgctgtttatgaataaattgcattcctttgcatcgggacagttcagcacagtttgcattgtccgcgtaaaaccttaaacagttcatgaaagttacctttggacagcagaccactaaagtgaaacaactggctgatttactcagtcaggagatttccatgggcaaatataaatcggactgcacattaccgtccatcaacaaactgagccgtgagtatcaagtgtcgcgggatacggtgttcaaagcattcattgatttaaaagaccggggaataatagactctactccgggaaaaggttactacgttaccaacaagcttacaaacattctgcttctgctggacgaatattctccctttaaatactcgttatataatagttttatcaaaaaactatccatcaactacaaagtagatttattgtttcatcaatataatgaacgacttttcaataccatcttacgtgaatcaataggcagatacaataaatacattgtgatgaacttcgacaatgagaaactatccccccatctttacaaaatagattcgtctaagttgctgctgttggatttcgggaagttcgataaaaaggattattcatacgtatgtcaggattttgacgattccttttatcatgcattggccgcattgaaagaacatctgagaaaatatcagagactagtacttttatttcccgaagacatcaaacacccccgtagcagttgtcagtatttcaattgtttctgtcaggattatcacattgattcagccattgtggaaaatacagaccggatacaagtccgtaaaggagaagtatacattgcaatccgtcagatagaggtagtcaatataatcaagcaaagccggacaaccgggctgaaatgcggagaagatttcggactgatagcctacaatgacactcctgcctacgaggtaatagaccaagggattacggtactcagtatcaactgggaagagctggggcggaaagccgcagaatttgtactaaccggacaggaaataagaacttatctccctaccgaagtccatttaagaaattcaatttaacaactaaaacctatgtatatcatgaaaaagtatcctaaaatcgggattcgtcccactatcgacggccgccagggtggtgtccgcgaaagccttgaagacaagactatgaacctggcaaaagctgttgccgaactgatttcatccaacttgaaaaacggtgacggaagccccgtggaatgtgtaatagcagacagcaccatcggtcgtgtagccgaaagcgccgcttgtgccgagaaattcgaacgcgaaggagtaggtgccaccattaccgtaaccagttgctggtgctatggctccgaaacaatggatatgcacccgcactggccgaaagcagtctggggattcaacggtacagaacgtccgggagccgtttatctggctgccgtattagccggacacgcacagaaagggctgcctgcattcggtatttacggacacgatgtacaagatttggatgacaacacgattccggccgatgtagcagaaaaactattgcgtttcgcccgtgccgccatggctgtagccaatatgcgcggaaaaagctatctttctttcggtagtgtctgcatgggtatcgccggctctattgtcgatcctgactttttccaggaatatctgggaatacgtaatgaaagcgtggacgaaactgagatcctgcgccgtatggaagaaggaatctatgaccatgaagaatatgccaaggcaatggcctggactgaaaaatattgcaagcccaacgaaggggaagactttaagaaccgtcccgaaaagcgcaaaacccgtgaagagaaggatgccgactgggaatttattgtaaaaatgactatcatcatgcgtgacttgatggtcggcaacccgaaattgcttgaaatgggattcaaagaagaagctatcggccataatgccatcgcagccggcttccaggggcaacgccaatggactgactggaaaccaaacggtgacttcagtgaagcactgctcaacaccactttcgactggaacggcattcgcgaagcatacgttctggctaccgaaaatgatgcttgcaatggtgttgccatgttattcggtcacctgctgagtggctgtggacagatgttctccgacatccgtacttactggagccccgaagcggtaaaacgtgtcaccggcaaagaacttaccggaatggctaaaaacggtatcatccatcttatcaactctggtgcaaccactctggacgctaccggtgagagccataatgaagcgggagagccctgcatgaagcccaactgggaaatgactgaagccgatgtcgaagcttgtctgaaagctacaacctggtatccggcagatcgcgactatttccgtggaggcggtttctcttccaatttcttgtctaaaggcggtatgcctgtcaccatgatgcgtcttaatctggtaaaaggcttaggtccagtattgcaactggcagaaggctggacagtagatattgatccggaaatccatcaggtactgaacatgcgtacagaccccacatggcctactacttggtttgtaccccgcctatgcgacaaacctgcattccgtgatgtctattcggtaatgaacaactggggagccaaccacggcgccatcagctatggacacatcggacaggatttaataactctggcatctatgctacgtattcctgtttgtatgcataatgtagaagacgacaagattttccgcccggcatcatggaatgccttcggtatggataaggaaggttccgactacagagcttgctcaacttacggacctatttataaatagttaataaattgagaattgaaaattaaaaattgagaaagggttatatgcctatcctttttttgttttcaattctcatttcttaatttttaatcctcaatctttaatttaagaaatgaaagatacagatcaacccatcctgcacaaagatggagtcagttacgtactaccgtttatattagtcacctgctgcttcgccctctggggattcgccaatgatatcaccaatccgatggtaaaagcattctctaaaatcttccggatgagtgtcaccgatggcgcattggtgcaagttgccttctatggcggatatttcgccatggcttttccggcagctatgtttatccgtaaatactcttataaagccggtatcctgctgggattgggactttatgccgtaggagccttattattctttcccgctaaaatgacaggcagctactatccgttcttattagcttattttattctgacctgcggactctccttcctcgaaaccagttccaacccttacatcttgtccatgggaacagaagctaccgctacccgacgtctcaatctggcacaatcgtttaaccctatgggctctttactgggaatgtatgtagccatgaactttatccaggcgaaactaaatccgatggatacggcagaacgagcccaactaaacccggcagaatttgcaatggtaagagatgcggacctgtccgtactgatcgctccttatctcactatcggaatagtcatattagttatgcttctagtgatacgttttacccaaatgcccaaaaatggtgaccagtctcacagtatcaatttcggtcccacactgaagcgtatcttctccatccatcattaccgcgaaggagtggtggcacaattcttctatgtaggtgcgcagattatgtgttggaccttcatcatccaatacggcacacgcctgttcatgtcacaaggtatggaggaaaaagctgctgaagtactatcacaagaatataatatcattgcgatggttattttctgtatcagccgttttatctgtaccttcatcttgcgctacctcaatccaggtaaattattggccatacttgccattgcgggttgctgcttcaccgccggagtcatcttcttccaggatatctggggtatgtactgcctggtagctgtttcagcctgtatgtcattaatgttccccacgatctatggcatagcgcttaccggattgggagatgatgcaaagtttggagcagccggcctgattatggctattttaggaggttccgtacttcctcctttacaagcaagtattattgatatgaataccatttggaatatgccagccgtaaatgtttcatttatcctgccatttatctgttttgtggtaatcactatttatggacatcgctcttatcaacggggaaaatattgatatgctgaataagaccattgtaaaaaagtgaaacgaagaatctgttactactcatatgaatcaaacagattcttcgctttattttcaaccaagtagaatgaaatgtaaagaagttatcccatcctcctatatattcttcaaattagaaaggaatctctaattggggatctgttcccaacaaattaaaagtcatccgatgatatggcgttgttccatgttcacggatagccgcacgatgctttttagtaggataacctttattactattccaatcataaaaaggatattctttatgcagttcattcatataatcatcacgataggttttcgccagaatagatgcagcggcaatagaaagatattttccatctccttttaccacagtagtatgcggcaaatcctgatactttttaaaacgattcccatcaatcaacaaatgttggggacgaattttcaattgatccacagcacgatgcattgccagaaaagacgcattaaggatatttatctcgtctatctcttcaggagtcactacacctacagcccatgccaatgcttctctttccacaatctctcgcagcgcataacgctgatgctccgtcagttgcttggaatcattcagcaattcattcttaaaatctacaggtaaaataacagctgctgcatatacagatcctgccagacatcccctgcccgcctcatcacaaccggcctctatcagatctttattcaaataaggtaataacatagctcatctttattgttgcttgcaaagatattcttttaaaagagaaacaagagtgtctttttacaaagaaaatcactatttttgcaaaaatacgcttgattatgaaaaacaacctacttgtatatattctcctttgcctgctgaatctctcatgggctaatgcccgtaataaacaacaagaagccgaggcactgattaaaaagtcggttgaagccttatacaataatccgaagcaggccagttactatgctgccaaggtaattgaattgtttcctgaagaaaggcaaaatgatcaaaaagccgaagcaatgttctattacagtcaggcagaaaagctattaggcaattttgatgtgagcatcaaaaatctatatgacgcattggagtatgcaactcctgccaataaagagctgaatggacaaatttacgcactgataggagcactctattgtaaactgaccgactataacaaagcgatcgaaatgaatgagaaagccatctcaatctttaaatccatcggagattccatttctatcgcactatgctacaatgatcgtggcatcatccattattccatgaatgagttcaacacagctgaacaattcctcaaacaagcccttataataaaccgcagtcagaaaaatttaagagggatatccgccaatttgaataatctatgtttatatgagggtgattttaatgaaaagctaagtttaattaatgaggccattatcatcaacaagaacttgaattctcaatggtcattaggggaaaactataacaatatgggaaaacaatacttctatgcaaaacaatataacaatgccttgatggctttacaaagagcatacgaggtcgcttcttccatcagtgccaaagaactgatttgtgataattacgaatatttatcttgggtatacgatgcccttggagaccataaaaacgcttataaatgcctgatacaactatatacccttagcaaagaattgcaaagtggaagtaaattacgcatcgtagaacaggaaatttcccataaacaatatcaaaaccaacaaaggaaagcagaactaagagagcaagcttatgaaatagaactactgaaacggaacctgtttgtactagtaatcatattcatctcattgatagtactcagtatatttctataccaatggtataaacgcaaaaagaatatgcagttaatggttacccgctataatctggagcaatcggaacatgaattggcagaacttaaagtacgacagcaagaactcgaattaaaatctgtacaaagcgcattatacaacagtcgtcaggaagctaccagttttgctgtattcctgcatagccgcaatgaaatgctggagaaaatcagagaaatgataaagcaaggatataagatggaccaacaggcattgattcctcatctgaagaaagtcaatgccttcatcagccaatatcagaatggagataagacgaacagcaccttgctgatgaatgttgaagaaaagaaccaggagttccttcaacggctatccgaacggcatcccaatttaacacaaggagaaagatatctagctactttattacgggtaaatctatctaccaaagaaatctcgatgctcacaggaaatgttcccaaaacaatcaacatgaatcgatatcgtttacgtaaatctctaaacttatcttcggaggatgacttgacagactatctacaaaatatttaaagaacctatatttttacagtttttatcaaacagcattttgtagatattatttctttatatagatcactatatatcaatatattacatttatatttgtagattaaaaaaaagagtttttttattcattgtagttcatttgtagggtataataattaggaatttgcacatacaacctattacttagcgatgtgaaaaacaattattaaccttaaaatttattcacatgagtaaaaagaattatttcaaggaaagaatcatgctattgattctactctttgcttttatgactcccttcggtacattagcacagacgattcagctgactggtctggttaccgatgctgccaacgaacctattattggtgccagtgtagtagagaaaggtacaaccaacggggtcatcacagactttgacggtaactttgcattaagcgtatcccccaaagccactattattatttcttatgtgggctatgcaacacaagaagtccctgtaaacggaaagaccaacatccgggtgactttgaaagaagatactgagatgctggatgaagttgtagtggtgggctatggaaccatgaagaaaagtgatatgaccggtgctatttcctcagtagatgtagacgatttggtaaagcgcaccacaaccaaccctgcagaagcattgcaaggtaagattgcaggtgtaaacattatgaaggctggtggcaatgccggtgcaggtgtgcaggttaaaatccgtggtgtcaaaacgtttggtgacaaccaacctctttatatcattgatggttttcccggtgatattgaaaatgtgaatccgcaagatattcagtcaatggaagtactgaaagatggtgcagccgctgccatctatggttcggttgctgcaaatggtgtcattatcgtaactaccaaaaacggtaaaaagggtgacatgaaaattgatttcagcacttatgtaagctttacaagcgtagccaaaaagctggaactgctaaatgccgaagaatacaaaagtgttcataaacaaatgtatcagaactacatgaaccagtatccagatgatacagaggttactatgcccgcatttgtaaataaaaacacaggaatagatacagactggcaggatgccatgctaagaggtggtgtttcacaaaactatatgttcagtatccgtggcggttctgaaaatgctcaatattcactttcatataaccatgctgacgaaaaaggtattttcttaggtaacaattaccgtcaagataatgcacgtttgaaactccacatgagcaaatatatatttgatattgatgctaacatcgctttcaaatttacggatagcaaacaacccgaatattccattaaagaaatgtacatgatttctccgcttgttcctatctatgatgatacaagagagtatggcttcggcttaagtgactttgacgatctgcccagtaaccgtaatgttatggctgaccagcattatgaaaaatctaccgacaaaaaatatcataccacagccaatgttgccttgaccatgaacttcaccccatggctgaatttcaagacaagctatgcatacagaggtgagcaccaacgtcagacttatcatactccggcctatgttgccgacccaaaagccaaacgtgactatccttatcatagcgaaaccacaggatactgggaggaacatgtatgggaaaatgtattaagttttaataagacatttggaaaacacaacgtcaatgcaatggcaggtacttccatgactgcccgcaaatatacatggaattctgttggggtagaaggtaaaaccactgtttataaagtagaagacggaaaattggtaaccagtgaaattccgggcggatttcttgatccatctttctcaactgtaggtgcaggagcaggtggcacatttgatggtagcggaacaaaatggaaatataaccgcgcctctttcttcggccgactgaactataattataatgaccgctacctggtacaggcaactgtacgttatgacggttcatccaagtttggtaaagacaaccgttggggttgcttcccatcagtggcattaggctggagaatcagtcaggaagaattcttcccgaaagacattgcattgaataatttgaagttccgtgtcagttggggacgtttgggtaatgaaaatgctttgggatattatgacttccttgcgctgattagtacatacaatgaaatgtatcaaggatacgtgaaaggcaacggtgacaacgcatgggcaggaagcatcgctcgcggattggaaaaccgttctttgaaatgggaaacaacggataccaaaaatattggtttcgatttcggcttctttaacagcaaattaaccggtacattaaactactactataaccaaacagaagatctgttgataacaaaagttctacctccttcagcaggtatgactaaccccaccctgaatgtcggaaagatacgcaataccggtttcgaacttgaattaaactggggagatgctataaaagactttgattacaatatcggtttcaatatgagcaccaccaaaaataaagtggttgaattgtcagatgcagaccaagttcttcagggtgaaggattgaaatatggaacggagcatttcccgacagaaaccagagtgggcaaacctatcggtgcattctatctttatagaacagacggtatcttccaaagtatggatgaagtaaatgcccatgtaaacaaggatggacaattattacagcctaatgcccaaccgggtgatatccgttttaaagatttagatggtaatggaagcatagacgccggtgacaaagaatactgtggctcaggtatcccgacattggaagcgaacttaaatctgtcattcggctataaaggatttgacctttcaatcgtacttggcagcgcatggaacttcaaattgtataacggaaacaaatatttctatgaaggtatgaactctaaatcaaatatgctgaagtctacattgaatgcatggactcctgacaatagaaatacggatgttccccgcgcagtatatcaagatccgaacggcaacatgaaagaatcagacagattccttgaaaacggtgattttgtccgtctgcgtcaggcacagttaggttatactttacccaaatcactcatgcagaaattctatattgagaaactgcgtttctatgtaagtggtgaaaacttgttcactatcacaggctatgatggtatagatcctgaattctctcgtgccagtgtgttgaataccggtgttgataaattgatttatccgtttacccgttcattcaccgttggagctcaacttacattctaatcctttaaagtaataagaaaatgaagaaactattatacatagcaagtatctgcattgcaagtttatttagcgcttgtgacgattatctcacggtagaatctcctgaccagttgacatcaagcagtttttggcgtaaccagtctgatgctgaagccggacttgccgccgcatactcccaactttacctgatgacttattcgggtgacatgtggtctttcccggaaatcaaatggccggtggaagcctatcgtgaagatattatccaattaggaagcgatgctctgaattacccgaactgggtggaattaggcaactatacctacaccaatggtaactctcagttcagttattactggcaatgctactataaaggcatcagttttgctaatcaggtaattgaaaaaaccgcagaaatacccgatgagaatatagacgcagcaacacgcgaacaattggtcaatgaaggctactttatccgcgcttattaccacatgcaacttttattgaactggaaagaaatcatagttcgtgataaatatatcactgacccggctgaattaagcaagcccctttcttcccgtgaggatgcatggaatttcatcattgaagacttgaaacgtgcaaccagtctgcctgcaacacgtgacgctgataatgtaggccgtgccacaagcggttctgcttatgcatatcttggtttcgcctatctgacacgcgcctatgaagaggcaaccaacaaagactcttatctggccagtgctatagaagcattcaaccaagtaaaaggatatgaactggttaataatttcagcactatgttcagcggggataataagaacagtaaagaatcgatttttgaaattcaattctctatgagttctgcaaacggagctacttatcgtactcagttccatcgatggatcggtgtttccgaacttgggggatgggatgagattcttcccagtcaaacattgattagtgaattcaaaaaagaaggggaaacggctactacaggacgttatgactcgcgtatgtatgcaacattattttttaattgtgactattataacgatggtaacggacgtgtctatggctacgactataatgactggttcgacaacaaagaacgcgtagccttccgtaaattcatgccctcgacctatgaaggtttaaaccaaaactattctgcaatcaatgttcctttgatgcgttatgccaacgtactgttaatgaaagccgaagcattgaatgaacagggacatcccgaacaagctattcctttaatcaatgaagtaagaagcgttcacggggatatgccacccatgacaggtacttctcaagaagcagtccgcgcgcaaattgaacacgagcgcatgattgaattccctcttgagaactatcgttggtatgatctccgccgttggggcaaactgtcctcagccctgcaagctgccggaagaacaggcttcaatgaagacaaaaattcattctaccccactcctcttacagagctgaatgctaatgatgccttaaaataagtattttcttttttggttagatataattaggcaacaaggcggttttcgctacagtgataccgccttgtaatctaaaaatgaagtatctttgcctataaataaaacgacatagatatgtttacaattattggattaatgctcacggggatgctcctcggcttcctgcttcgcaagcagaagctttcaggaatacacaaagtcatcaccgttcttatttggttgctactctttttattgggtatagatgtaggcggcaatcagaaaattatcaatggtctgcacactatagggttggaagccattgtcatcaccttggcagcagtgctgggcagtgttacagcagcatgggctttatggtatgtactttacaaaagaaataaggagggacaagtatgaaaggaagtttgattatcgtcggattctttgtactgggagctctttgtggggtatatcaccttattccatacgactttacacaaagtaagctaagtttctacgccttgtgtgcgttaatgttcagtgtaggagtcagtgtaggtaatgatccgcagactttacgtaatttccgttcattaaatccccgcctgatctttctaccggtcatgaccatattgggaacactggcaggatgcgcagtggtcagtctgtttctctcgcaccgctcagtaacagactgtatggcagtaggtgccggtttcggctattactctctatccagtatctttattacagaatataaaggtccggagttgggaaccattgcattattatccaatatcacacgtgagattatcactttgctttttgccccgttgctagtacgctggtttggcaatctagcccctatttctgccggaggagccactacgatggatacaacattacccatcatcacccgctattccggtcaaagcttcgtagtagtttctatatttcacggctttgtagtagacttcagcgtaccttttcttgtgactcttttctgttctatttaaaataacaataaccatgaaacactctcttcatactgttcttacactgttgtttgtttgtgcttccgcctggggtgaaaatgtcccctggcagaatccacaaataaatgaaataaaccgtgaacctgcccatgcccatttcattccttatacgaatgaggccaatgcactgaaacaacaggctttacctgccgcccagcgttttgcagtaaaccctgctacagaacgccgcatttcactagacggaacctggaagttcttattctctaaaaacaatgaggaatgcccgacagatttttataaaatggggtataacaccaaacgctggaaagacatacaggttccgggaagctgggaactgcaaggatttgactcccccatctatactgacgtagcttaccccttccctgccaatccgcctcatgttccaaccgattacaatccggtaggagcatacgtacgtgaatttaccgtaccggcccattggaaaggaatggatatcttccttgattttgaaggagttgagtccgctttttattgctgggtaaacggtgaattggcaggatacagtgaagacagccgtcttccggctcatttcaatattactccgttcttaaaagccgggaagaacaaactggccgttaaagttttccgttatagtgacggttcctacctggaggatcaggattactggaaatatagcggtattgaacgcgatgtatatctctatgcccgtcctcaaagccgtgtacaagacttcaaactggtagccggtctgacaaatggttataaagacggagattttaatctggatatcacactccacaagcctcatctgggaggaatcgtggaagtgaaggttatggacaaaggcaatgtaatttaccagcataaaaaggaaataacttctgctacagatactttattcgctcagaaacacttgttcccggccatattgccttggaatgccgaaacacccaatctttatacattggtagtcagcacctacgacgctcaaggaaaagccttggaatcattcacacagcctttcggtttccgttctgtggaaatgcgtaacggcatgcaactgataaatggggtagccgtattgtttaaaggagtaaaccgccatgaacacgatccgcatcatggtcgtaccatcaccgtagagagcatgataaaagacattcagttgatgaaacaattcaacctgaatgctgtacgcacttgccattaccccaaccgctatgaatggtatgcattgtgtaacgaatacggtttgtatctggtagatgaagcaaacattgaaagccatggtatgcaggcgcataaagatggcacactggctaataatcccgattgggaagtaccgtttatgcaacgcatgagccgcatggtgctgagggaccgcaatatcactgccattgtcacttggtcaatgggaaatgagtccggctacggaaaacactttgaaacgttatatgactggaccaagaagtttgaccctacccgccctgtacaatatgaaggaggtggttatgatgccaaatctgacatttattgtccgatgtatgcacgtgtctgggcgctccgccgtcatgtaaaccaacgcgacgcacgcccgatgattctatgtgaatatgcccacgccatgggtaacagtgtaggtaacctgcaagactattggaatttgatttataaatatgaccagttgcaaggtggtttcatatgggactgggtagatgctacttttgatatcaaagacaagaacggaaacaagatttgggcttacggaggcgatatgggcttcgtgggtgttcctaatgactccaacttctgtgccaacggattggtagctgccgaccgttcacttcatccgcacatctgggaagtgaaaaaagtatatcaatatattcattttgagccggttgcctttaccaccaagcaaattaaagtgactaactggcatgattttatcggtttggaggattacaaactacactggactgtagaaacagacggaaaagctgtacaaagcggtgaaatggatttcccggttatggccgcccgttcttctaccttcatcactatcccgatgaacttgattcctaacgatggaaaagaatacttcctgaaattggaagcatttaccaaaaaggaagccccattagttccgaagggacatcaggtagccatggagcaatggcaactgaatccggaaggagaacggctgctgaatgctacatggactgcccgggaactagtagacaaaactgtaaataccgaacgtactccggatgccattaccttgacaggagagaacttccgtatcgcattctctactgctgatggtgaaatgacagaactcttatataacgggaagaatctgataaaagaaggattgcaacccaatttctggcgtgcgttaaccgacaatgatgttgccaacaaccacctggaacgttgcggcatctggaaatttgcaggcaagaacgccaagttacaaagtatcgacctgaaagaagattcaaacaaacaactggcaaccgttactgtaaattataaactggaagcacaagaatcaactttgcagaccgtttatcaagtacgacccaatggagcaatcaaagtaagtatgcactttgtacccggcaacaaatcccttcctgaaataccacgcctgggtatgcgtatgattcttccggcagaatacgatgtgatgacctggttgggccgcggaccacaagaaaactatgcagaccgcaagacgggttatcctatcgggctctataccgctacagtatgggaacaattccatccgtatgtccgtgcccaggaaaccggcaacaaaaccgatgtacgatgggttgcattgcgtaataaagcaggggaaggcctgttaatcacaggtgaggaaccgctgaatgtcagcgcatggaatttcccgttggaggatattgactatgtagcattcaataccgaacgccgtcatggtggaagtattatgaagaaagacatgatatggttaaacatcgaccaccgtcatatgggggtaggtggagataatacctggggagcgcaagtacatccggaatataccatcactccgcacgaatggcaatacagctttaccatgcaacctttgagcaatcaagacgatgccgctgaaaaagcgcataagaaatggttttaaaataataacgaaatgacatgaaatataaatttaccaaaatcattcttctcacagcagtagtcgcaggtctcacaacggcctgcacacctgccggtgagaacatccccacaggcaaaagatatgaattcaataacatactggatataacctatacccccgatacactgacacgttgcgggggatggtttacagacgccggttcctggatgggatttacccttccgcagaaagatcactgggtgaacggtttctgcggtccgttcagtctggatatgaaccgacgccaatggatggcgcaatctgctgtcacggtaagatatgccgatcaggcgaatgttatatttactccggattccacttgttatttcccgggagagttatatctttcggcaagttcagaggaaggtaaaatcattcaacgcttgaattttttagatgcttctaccgcattgctccgcattcactccgatgcaggaaaggaactctccttaactgccagccaatggggaaaagagatacaagtccaaacagaccagaataccgtcatcgcccgtcatccctccggtgagattgtagcattaacttttaccccggatgttagcgtaaagggcactgacaataattaccaggcaaaaatcaatggcagcgaacacgacacctacgtagccatttctttctataccggagaaaaagaactttctgccggattacagaaagcgcaattggctctaagcaatccgcaggaagggctcaaagccaacaaagaacgctgggaaggttatctcaccaagattctgcgcaaagatatgaaacctgagtatgaccgtatcgccgtgaaagcagttgttacacttatcagcaactggcgtacccaccgtggcggattgctccacgaaggaattgttccgagtcatgcagcatactacttcgtaggattctgggcctgggacacctggcgcttctctgccgccctggcaaaattcgatcctaaacttgccaaagacaacatccgcgccatgtttgactaccagcaaccggacggcatgattatagactgcatctacaccgatcctgccgaaaacaatgcacgcgacagcaaacctcctctcgtatcctgggctgtagacgaaatattcacccataccaatgatacggcattcatcagcgaaatgtatccgcaattgatggcctattacaaatggtggtacaacaagcgtgaccataaccgcaacggtatgtgtgaatacggttccaccgatggtacactggaagcggcagcatgggaaagcggcatggataacgccatccgtttcgatgatgccaagatgctgaaaaatgacggtgcggaggatgcatggagcatggatcaggaaagtgttgacctgaatgcctatctggctttggaatgcaagttattgaaaaagttcgccggcattttgggagtaactttcgatggtccggattacagcagccaggtagccgattatttcttcgacaaagaaaaaggtttcttcttcgatcgccgcttaaaagacggaagcttcatacaggaaccgggatgcgaagcatacacccccttatggacaaaagttgccacggccgatcaggtaaaagccatgctgcccctgctgaccgatacagccaagttttctacatacattcccttccccacagtggcagcagaccatccgaagtacaatccgcgcggctactggcgtggtcctatctggttggaccagacttacttcgctatccgcggcctgcgcaattatggatataacaagatggcggatgaatacaccctccaggtattcgaccgtctgcaaggcttgaaagaaggcgcaccgatacatgaaaactatggcacacacaccggtgaattgttaaaagctccccatttcagttggagttcatcacatttgctgatgttatacgatgattacggcaaataaactctctctttttaccttaatataaataatacaataccaaggagggctgcactcgtgatgaatgcggccccctacttttatatcgtattacctgttacccccaatacactcttttcagaagtgataaaaattctccaatgaatgagtagaatgttacaggtgtaagattatatatcttccggctgcaacatgatatatccttcagcctatacatccgtatgtgttcacacttcacaacaggaaacttcaaaacatctgccccttttttaaaaacaacaggacatattaaaaaaacatcaagagcttttattaatacgtcctgttgtttctcctgtttctttatatacacatagcaaaacacttatttttccttcagaagtttcagcctctccgcaaacgctttgttcatcggcattccggctgaagaattgatacctcgaaatctttcagactgaaaaaaaattcttcagcgtacccaatggccgaaaggtgaaaagcacgcaggtacatggggaaaactccgaagatgccggaaagtacacagccatagctgaaaaaacgtatatgccggctgaaagaataaatacccggctgaagaattttaagagccaatccttcagccggaaagcccatgaacaggcagtttgcggagaggctgaaacttctgaaggatttttggggcaattcttcgggaggggcatatttcccaccggaagaggaatatgcccacagaaaagaacataaaaagacgcaagaaaccgggatgcctgatatcttgttacaagatgcggcaaatcttgtgagaagtttctcccaatcttgtgggaagttccgctgattcttgttatacaaaaaaagcctgccattaatataatgtttatcaatggcaggcgacttatttcgtttggagaaatcaaaacatcctgctgacgcgctcaatgccggcagccagcatatctatctcctccttggtattatacaaaccgaaagaagcacgtacagttccctcaatccccatacgaatcatcaaaggctgagcacaatgatgcccggtacgtacggcaatgcccagacggtcaagcaacgtacccatatccaaatgatgaatatttcctaccaagaaagaaatgacactgctcttatgctcagcctctccgaagatacgcatcccgtttatttctttcagacgctgcatggcatatagggtcagttcatgctcatgggcagcaatgttctccataccaatggcagatacataatccaacgcttttgccaaggcggtagtgccgatataatcgggagttcccgcttcaaacttaaacggcaattcattaaaagtcgttttctcgaagctgacactttgtatcatctcgcctcccccctggtaaggtggaagcttatccagccactcttcctttccataaagcacccccacaccggtaggaccatatatcttatgtccgctgaaagcaaaaaagtcggcatccaaatcctggacatccactttcatgtgaggaacactctgcgccccgtcaatcaaaacgggaacaccgtgtgcatgggcagtcgcaatcatctctttcgccggattgacagtgcccaacacattacttacatgagcgaaactcaccagcttggtccgttccgaaaagagtttctcatattcatccaacaacagttctcccctgtcattcatgggaatcactttcagcacgattcctttacgcgcagcctgtaactgccaaggtacaatattgctgtgatgctccatgacagaaacaatcacttcatcgccttccttcatctgactgtcggcaaaagaagaagccaacaggttgatactctccgtcgtgccccgtgtaaacacgatttcattgctactgcgtgcattgataaaacgacgtacagtctcacgagaagcttcatgcaactcggtagcctgctgagacaggaaatgcacaccacgatgcacattggcattgaccgaataatattcatcggttatggcttcaaccacttggcgcggtttctgagtggtagccccattatccagataaataagcggctttccatacacctcccgatctaatatcggaaaatcttctcttattttttgtatatcgtacatggcgtcttatttacatatcgcacatccctgacatttattcaactcaccacggaaacgtttttccaccaacagatgcaaacggtctttcaatgcatccaggcggatcgtatctattacttcattgacaaaagcaaacataagcaataaacgtgcttccttcagactgataccacgctgttgcatatagaacaacgcattttcatccagctgaccgacagtagctccgtgagagcattttacgtcatccgcataaatttccagttgcggctgagtgtacatatgggcatcacgagtagcacagaggttgcggttggtttgttgggaattagtatgttgtgctccttcacgtaccaatacttttccggcaaacgcacctgtcgcctgatcatccaatacatatttaaacagctcattactagtgcaatcagcaaccttgtggtcaatgaaagtatgattgtccacctgttcattcttatcggcaatgaccataccacacaaattgatctcagctccacgtccggccaaagttacttcagttgtattacgcgtagtaccgttatgcaaagtcataccattcaaaagcacattactgtctgcctcctggttcacatagaggttactgaaacgcactgtgctggtatgggtttcttccagttcataaagatcgaaagtagcattttcttttgcaaagacctcaataacctgagtagaaaggaaatttacattatccatggcatgatcacaaatcaacagacgagcctgcgcaccttcttccagcacaaccagcacacggcggttcaccataaaattaacatcagcacgcaatatgttcaccagttgaatgggtttgtccaccaccacgcctttcggcacatacagcataaagccatcctgggcaaaagtagtattgaaggcggtcacaccatccttggaagtatctgccaacttgccataatactgcttgaccaaagccggatattgttcagacagctctttcaagctgccaagcaacactccttccggcaattgtgccttcggcaaagccttacgataaaaagcatcgtttactacaaaataaagagcggtactcatattaggtacatcgcacttgaacacttcatacggattcaccggaatgtcgagtctgttcaaattcaaaccataatccggctcgaacaacttgctcacatccgtatatttatacttctcctgtttgcgggtagggaaacctaatttttcgaaatctgcgaaagcttgcgcacggggagcgttcagcacctcggcactatgccggcaaatcatcgcctcacattgagaaaagagatcaatatattgttgttctgctctcataatcactttcttctttaggcatcaaattattattctcccaactcggcttttatccagtcgtaaccacgctcttccagttccaaagccaattcgggacccgcagtcttcacaatacgtcctttatacaatacatgtacaatatcgggtttgatataatccagcaaccgttgatagtgcgtaatgacgatacaacttgtttcgggagttttcagtttgttcacaccctcggctacaatacgcaacgcatcaatatcaagaccggaatccgtttcatccaaaatgctcaacttaggttccagcatagccatctggaagatctcattgcgcttcttctcaccaccgctgaatccctcgtttaccgaacggtttgccaatttattatccaattccaccacagcccgcttctcgcgcatcagcttcaagaactcactggctgtcaatgcagggaggcctttatatttacgctgctcgtttaccgccgcacgcataaagttcaccatactgactccgggaatctccaccggatattggaaagacaaaaacagaccttcatgactgcgatcctcaggactcaaagccaacaaatcttttccttcaaaagtcaccgaacctttcgttacctcaaaagccggattgcctaccaacacagacgaaagggtactctttccggaaccgttgggtcccataatagcatgaacttcacctttctttatgcttagattaatacctttcaatatttctttgccattgacactggcatgtaagtcttttatctctaacataattctattaaattcttagttcttcatttatcctacacttccctctagagaaatagccagcagtttctgtgcctccaccgcaaactccattggaagtttattcagtacttcttttgcatatccattgacaatcaacccaatagcatcttctgtaggaataccgcgctgattgcaataaaacaactggtcttcgctgatcttgctggttgtcgcctcatgttccaccacagctgtctcgttatgaatatccatatatgggaatgtatgagcaccacactggctccccagcaacaaagagtcacactgactgtaattacgggcattgtctgctttctgagccacacgtaccagaccacgataagagttctggctctttccggcactgattcctttactaacaatggtactacgggtatttctgcctaaatgaatcattttagtccccgtatcagcctgctgatagttattcgttactgccaccgaatagaattcagcagtagaattatctccactcaggatacaactgggatatttccaagtaatggccgatccggtttccacctgtgtccaactcaatttgctatccactcctttgcaatgaccgcgttttgtcacaaagttatatactcctcctttgccttcggcatctcccggataccagttctgtacggtagaatatttcacttccgcacggtcgtgcaccacaatctccactatggccgcatgtaattggttctcatcccgcataggggccgtacatccttccagataagaaacataactatcatcatccgcaacaatcagtgtacgctcaaactgaccggtattggctgcattgatacggaaataagtggagagttccataggacaacgcactcctttcggaatatatacaaacgatccgtcactgaatactgccgagttcaaggctgcaaagaaattatcccgcggcccgaccaccgaacccagatatttcttcaccaaatcgggatgctcacgcaccgcttcactgaacgaacaaaaaataatccctttttccaacaaggtttctttaaatgtagtcttgacggatacagagtccatgacagcatctactgccataccgctcaacgccatttgctcctccaaaggaatacctaatttattgaaagttttaatcaactcaggatctacctcatccatacttttcggtccttcttttttctttgtagggtccgcataataggatatagcctgataatctatttcagggatagtgaggtgtgcccatgcaggcatctccatggtcaaccagtagcggtatgctttcaggcgaaactccagcaaccactccggctcgttcttctttgcagaaatcaagcggataacatcctcattcaatcccctttctataatatctgtgtgaacttctgtggtgaagccatatttgtacttctcctgcgtcagttctttcacatatttattgggttcttcttgcatatctatcttatatttctattaattgttctgttacattcttaaataccggaaaaaagataccggacaagtccctcatagaataatataacactgattccttcttttttgttgcactgatcatctcattgttcggatctatatattctatcacatgaatagctaaccctatcagtatcatatacttcaatgctcccaatccgctgcctaaccaacggttcagccatcccaggtgcacagcatccaatgcttttgtcaacaaagaggcgacgaacgcaaaacctaaaggtacagctatccagatcaatataaaagccaagacctgtgctacagtcgtcgaagtacctagaaccggcgccaacctttcggcaacaatgccaaacaaggcacgagccatcagcaatccggctatcaaccctacaatagacgccatctgcttcacaaatccttttattaatcccataatgacacccacaccaatcatagccaatataataatatctattgtcgccatctttatcgttattacaaaaagcagtaatgccattctgaacaaagcgaagaatctgccagcccacgcgctgggcgaggtgccagatccttcgctatgctcaggatgacattaccatctatattctcagacttcagtgtattacaaagtctgtttaacctctacttcttcgtaagcttcaataatatcaccgaccttgatatcgttacagtttgtcagactgataccacattcaaagttagtacctacttctttcacatcatccttgaaacgcttcaaagcattgatagcaccggtaaagactacaataccatcacgaatcaagcgtgccttatcagaacgtttcaccttacctgtcttcaccatagcaccggcaaccaaaccgaccttgttaatattgaagacttcacgcacttcgatggttgcagtaatctgttccttcaaagtaggtgccagcataccttccatagcagccttcacttcttcaatcgcatcatagataacagaatatttgcggatatccaccccctcctgctcagccagtttgccggcagaacttgaaggacgaacctggaaacctacaataatcgcatctgatgcagcagccaaagtcacatccgactcagaaatctgaccgacacctttgtggatcacattaacctgtacctgttctgtagacagttttatcaatgagtcgctcaacgcttcgacagaaccgtccacgtcacctttaacaatcacattcagctcatggaaatcacccaaagccaaacgacggcccacttcatccaatgtcagcagtttctgagtacgcaagccctgctcacgctgcaactgttcacgcttgttggcaatgtcacgagcctcttgttccgtatcaatcacatggaaagtatcacctgccgcaggagcaccgttcagtcccagaatcaataccggttcggaaggaccggcctccttgatgcgctggttacgttcattaaacatggctttcaccttaccataactagtaccagccaagactatatcgcccattttcagcgtaccgtttgccaccaacatagtagccacataaccgcgtcccttgtccaaggacgattcaatgatagaaccggttgccttgcggtcgggattagccttcaaatccaacatttcagcttccagcaatactttttccaacaaatcgtgtacacctgtacctttctttgccgaaatatcttgcgactgatacttaccaccccactcttccaccaggaagttcatggcagccagttcttccttaatcttatccggattggcgtgcggcttatccaccttattaatagcaaatacgataggcacaccggcagccatagcatgattaatcgcctctttggtctgcggcatcacattatcatcggcagctacaataataatagcaatatccgtcactttcgcaccacgggcacgcatggcggtaaatgcctcgtgacccggagtatccaagaatgtaatatgacgtccgtcttccaatttcacattgtaagcaccgatatgctgggtgataccacctgcctcaccggcaattacatttgctttacgaatatagtccagtaatgaagtcttaccatgatcaacatgtcccattactgtcacaatcggagcacgcggctgcaaatcttcttcgttatcttcctcttctgtaatagcctgtgctacctcagcacttacatattctgtcttgtatccgaattcttccgctaccaggttgattgtctcggcatccagacgctgattgatagagaccatgataccgatactcatacaagtagcgataacctgagtaacaggaatatccatcatacttgccagttcgttcgcagtaacgaactcggtcagtttcaatattttgctatcttcctgttccatctcctcctgttccatcaggcggttctgaacattttcacgtttctccttacgatacttggcagccttgttcttagtcttgttagtcagacgtgccaatgtttccttaacctgctttgccacatcttcatcactaacttccgcttttacaacaggtttcttgaaacggtctttattaaatttgcctccaccctgattgttattgccattaggtttggagttattgttcctattcggtctgttagcgttatcgttacgttggttattattagatgctcctccagcatttgttgtaccggcagcatttatatccacacgttccttatttattctattgcgttttttcttctttgcagcatcatcgttaaccgagtttttagaaatcttatcgtctcccttacggatttctttgataatagcatccttcatcagtttacgctgttcctgacgctgcttatctttctcttctctctctttccgtttttcttccttcgatttctttttcggacgggtagactgattcaatgcagccagatcaatctgacctactacattaattttcgatttaaattcagtaggacgaattttaaatacatcgtcttcttctttttcctgaacgggtgctgcttcgggtgtttctttttccatctctttcacctggggtgtcttttcttccgtcttttcaattttaggctctttcttctcttccagaactggagcaggagcaggttccggtttcttttcctctaccaccacaggcttcggcgtttccttctcgggttggggagtttccttcctctcaaccaccttttccaccacgggttctgctttcggagtttgttcaataactttcgcaactggttctacaacctttggcgcagttttcttgttcaaattgtccagatctattttacccacttgcttcagtttggggcgtgcctcttcaggaataacagttttcaccacctcttctttctctttcttagattcaaaaccttcgatagagatagaagctttgttgcggtccttgttctgtctttcctgactaaatttttcagactctatttttaaatttttatctgtgctgaactctttcacaagtacagcatattgttcttcggtaattttcgcattaggactagcctcaatggtatagcccttcttctgcaagaattcaactaccgtcgttattcctacatttaaatctcttgttactttgttcagtctaatcgtcatactcgttttttaattattaactacgagccgggactgaagagttactcttcaaattcagctcttaaaactctcaacacgtcatcaaccgtgttttcttccaggtccgctttttctatcaacatctcgcgcggagcattcaatacagccttggctgtatccaatccaatattcttgatggctgtgataacccactcatcaatttcatccttgaattcatcaaggtagatatcctcatccatcgcgctctcatccaattcgcggtacacatcaatcgtatattcggtaagcatactggcgagtttgatattcattccccccttaccgattgccaaagacacttcttccggtttcagatatacttctgcttttttctcctcttcgtgcaacacaatagaagaaatcttagccggactcaacgcacgctgaatgaacaactgaatgttagaagtatagttgatcacgtcgatattttcattacgcaactcgcgcacaataccgtggatacgtgatccttttacacctacgcaggcacctaccgggtctatacggtcgtcatacgactcaactgctatcttagcacgttctccgggaatgcgcgcaatcttcttgatagtgatcaacccgtcattgatttcgggtacttccatttcaaacaggcgttgcaagaacacaggtgaagtacggctcagaataatcttcggattattatttttattatctacacgggccactacggcacgggcagtttcgcctttacggtagaaatcactcggaatctgttcagtcttgggcaaaagcagttcgttgccttcatcatccagcaacaacatttctttcttccatatctgatagacttccgcactgattacagtacccaccctatcaatatatttattatacaagctatctttctccagttctaaaatcttcgatgccagtgtctgacgcaagttcagaatggcacggcggccaaacttggcaaagattacttcatcggtcacttcctcacccacctcataagacgcatcaattttctgtgcctcggtcaatgagatctgcatattgggattcgtcaaatcctcatctgctacaacttcacggttacgccatatttcaaaatctcccttgtcagggttcacaataacgtcgtaattttcatcagtgccaaacattttcgcgatcacactacggaaagactcttcgagtacactcaccatagttgttctatcaatattctttaattccttaaattccgaaaatgtatcaatcaagctgattgtttcttcttttttggccataattatttaaaactaattaagtatttagtgtattttatctcatcatatgcaaaagtaatattctcctctaccagtttggggcgtttggctccttccggtttcactttcttttcaatggttacggtaaagttctcttcatttgcatccttcaatacaccttccagcttctttccctctttagtcaggatttccacctccttaccaatgtgtatcaagtactgttgcaataccttgaaaggttgtcctataccggccgaacccacttccagttcataatcctcttcttcacggtccagtttagactcaatatagcggctaagttctacacaatcgtcaatccatactccctcggcatggtcaatttctaccacaattttgtcatccgggctcaccgtgacatctaccaaaaagtaatctttaccttccagccactcgtcaacaatccgggttactacatttttatctatcatttattcactattaagaacaaaaaaagggcttaatcaagccccaccattcatccgtttcggtgcaaagatacaaattatctaccagtgctacaaaatattctattaaaaaattgtagttttgcagaaacttataacactatggataaaaacagtttaaatacgaacaagcagttcatgataggtaacggtatgctggcttttggagtctttgccgttattatcatttttttgtatatgtccttccgtttccaacgcaaggctgacaaagtacagacttatgaaggagtctacaacatagaactgactaacagttttgccggagacagtatagcggtatatctaaatgacagtctgctactggaccaaaccatgcccgacgccaacctgaaagtggagataaaacgctttgccgaagataatgtactgatggtcgtagataacaaaacagacaagaccacacctttcaacctgaatccggaaggtagccgggtagaggttaaaaagagtggagatgtaatttatatcttggaaagagaagccgattcccttttggaataaagggaaacagcgacaaagccgatcaatacgataaagacacccaccaaagccggataccgataacccaatccggcatctatgggtagcccaccggcataagcaccaatggcattgcccaaattaaaagcgacttgcacacaggccgctcccatcatttctcctccgcgtgaattccggagtaacaataattgttgtggagccgaaacagcaaataatcctgccgtacatatacacatcaatattactgccaaccaagaaacagaagccgcaaagaaaatggcaagcaaaccggaagccataataacctgtgtatattttaccacacgggcagccccatactgatcagaaaactttccacccatcaagtttcctacagtcatgctaagacctgccaacaccataataaaagtcatgctgttttcactgaaacctgccacgtgcgtcatcaaaggagtaacataactataccaacaaaagatgcctccgtttccgaacatggtcgtaaatatcaacaaccatggagccagattcttcaaaaaacggaactgtcctttcaaacctgtatctggcaaagcaggcagtgaaggaacccatttccaaatatagaacaaagtaatcagtccccatactccattaaagagaaaaggaatacgccaagacattatattactcatgaacgtacccaaaggtacaccaaaaagattggcaatcgtcatacccgacaccatcaatgccactgcctgcgaactttttcctttatcagccactctttccgccacaatggaaccaaccccaaagaaggcgccatgaggcaatccggaaataaaacgcatcatcaacatcatccaataattcactgaagcggcagcacacaaattaccacaaatataaataaccatcaaacctaacagaatatgtttcagcggacgggtacgagccaccaaaaccatccccggtgctcctacgcacacacctagtgcataagccgaaataaaatgtcctgcttgcggaatacttatatgcaagtccttcgctacatcgggcaaaatgcccatcattacaaactcggcaatgcccaatcccaatgtgccgaacgccaaagccgtcaaactcttcttcatacctgaataaaaacaatccattaattaaaaaacgtacaaaaataattgttatgttttcagatataagtgtttttagcacacttttataagaaaaggaatgattacttgctttatgtcaatttattgttgccacatgcaaaagaggtcaaacattttagcttcacgttcagaagttaaaaagaacaaacaaacctctctacaaagccatgcttactaatcaacattcacactaaacaaacctttgcttcctgctccattatcaacatcccgtaaactctgattgattttacattcagcacttttcagtttagtacttttatacgaaaacaagcctttgcttcctgctccgctagcgacagcatttgaacttttcgttattatacacctatcactcaattcataaccgtaatccggctgagtgctttcacccacccgaacatctaccaattcttgtgtcttcataattataaacatttagtatattaagataattctttgtctaaataacacaaaataaattcgtttctcgcttgcaatatttctgcaaaactgttttttactatattcacgttcggtaaagcgatcttatcaagatacttataatgaatatcatctgcacaggatataatgtaaccatcatgagtaacgaccaattcattaaggaatggaatgctgagtaaaggataactaaactccaacaccttattccccctctgatatttcattttattgcctctgtatatatattcctctatttttccggttaatatattttctttcagaaacagttcatacgccattgctttcgtcatacaaatccttatatcaatagcatccggactgttatcattattcataaaatcaagacagagcgaaacaaaaccaagcaaggattcacacgacaaacttttcaatggtttcatttcaaatggtgaataatacatgataggagcaaaattaaatttatcaactcctaatttccaatatgcaagcaacatggataataaatcagctccattatcatcaaaaatagtagaagtaatgtttattttatctcgatgctccacattttcaatcaactcataaaccgtattgtatccattctcaccccttatcaaatcattgtattttccagagccctcaagactaatttcaaggtatgagatgttggttgcaagaacttcgtcatacccctgaatatccatactcattccatttgaaacaactccataaaatattctcctatcttccttatattccgctaaaagattcaggatatcaaagattctattatccaaaaaagattctttacccgaaaaatgaaaatgtttcatacccattccaatagcttcatcaagaaaacttctccatcttgccaaagaaaccgactctgatatgggccgggcatctccaaaataacaatgcctacatttcagattacatttattactgacgaatgaatctataatcataggttcattctgccgcagcttggcatctatatgttccataaaagatgccttatctatatattttttcagatttccaatcatctggcaacttcgtaatacaatatataagtagaattcattaacggattatcttcttcataagatatcgtatctgtgatttcggacatatcaacgtccaaaatcaactgggccttatccataccgactttatatttatatatacttgccgatttaaaacctatatcttctttacattccaaagacattttcagatgtttcaccgtacctgccaaaaaattaggcaatgtagtatagtcgcaatctgtaatattcaacatattaggccagcaccattcaatcatcaaatcaacaatactaccgggactttttactttgccataagaaacaacaacctgcttcaacaaagaatcctgtccgttatcagcaattcttgcacataattttttctgcttcccaccaacacgctcgaacgcttgtatgtttatatcttcaaagttaacaatggtatcacctgccaccagcagttggaatgtactgattttatgcgaaacaacacctcttatatttaatcggacaaaggaatctctcttgtttcccatacctcttttttctattgtattctttatctctattgaatcaatatcaatgttattctgtatatattcccccaattcattgtataaatactctgtggtcaagaaaaagcgtcctttgaatggcacaattttcatcatttcctgcaatgaacgaatcattgcatcttgctcgttcaatttaacattcaatacttccaccctttgactcatcgatttgtaccgttccctcaacatagcaaaaataatagtcaggcatacaaatacatatactacccacgcaggaaacgaaagcaaaattgatttaatatcaagatcaggctgcgtaaatagttgcaaagcctgtataaccccacccagtgttgcaaagccgccaaatgtctttatacctaagttgtacaagtataatctattttccatattgtggtttgtctgtttctagttgctttaactcattattcaaaatgtctatttctctctgtatatcgttccattccaaacgcccagttgtcatcttctgctttaacttcaaatccctgatttttttctttatctcttctattttattcatggtatatacaatttattgattacaaattcaatgaacagactctaagcgggaaagaaacaaactattcttcagagtcatttcctttaaaaaaagcggggaaagaaacgcccgttgccggatacgtatgctttccccgcttgaaagaatttataatttctactttgggtagaagttgcttctcacgaaggagaagcggacttttactttatagtatgattattttttaatcatctaaattcagattagaggttagattttacagttacaggaattgtaccaaccgcaacaccccaagtgtatgtaaccgtaactttcacattgatagtcttgttggctgtcaaagctacaccatcattctgccatgtaaattcacccgttgtagcatttacactagctcccttagcagcatcctcttccgatacttcgaacttagctgcctgagcattatagtaaccggcaatagtagcatccatcgtaccgttttcaattactttttcaccagcaatgcttaccaagttgattgcagaattcaactgcaatttatcggcaggattcttcttgtctgtagtttcaaacttggcatctttcttcaaagtgatattcttcaacgggtcagcaaacttaacctggatcttagtaccattgtcaatcttctggccattaatcagaacaaataccattacatcaaccggatcgatcttagaaatgttgatacggttaccttctttatcattgcaagatcctgtataggtcaggatattgttagtcaaatcaaaatctgtacgagtttcaccagctactgtttcaaataccaaatcaaggtctttattcttatatccgcgacgtaagtcaccagacatgacataattagaacctacaagtttaccggcattaatcatataaccgtctttccagtaatcattgtctttaaccaaagttacttcaggatatactaccttaacctcataaacaacttctgcacctgtattaccaattttaaatactactttgtacttgccaagctgctccttagtcaagatattcttaacatctacatacaagaagttttcattgttttcatatgctgagccagcagaaataacacccttgcttgttggtacatattcacttctatctgcatcccaaatataatatttagaagaatatcctgcattccagaaagtttgagaagacatgcccaatgtattatatacatcattcatatcaaacttgaatctataatcttttgattcaagagttaattcatgagtttcagatttagtataagtcttagtagtagcaatcttctcaactgacgatacagtcaattctttttcagccaatttatatccgtctttcttatcatatacagatacaatgaaagtacaattatgacctacagaagaaatttgtccattcgttttgataacaccattttctacagtgaaataattgcctttgtcttcaccagctttcttagctacttcgtagtaaggagcaaaaccgtattttctcaaatctttgtatgaattataagaagtgtagtcgccaacacttaaagtatcagcaacattcagttcacctgtatataaaaggttcatcggaataatggtactccaattcatataggattcatctccattatcatccttacgagcttcgaatactgtcaagtttctacgatcgattgtttgagatgtaagcaaatgataagtagagagtgcagtttgcgcatcattctgaacctgcaaagccacggcatatttcttattcttcaaagagaatgcttcaccagccttagcttttacagtcaaaacaccatcagcaaacgatttgtcagcaacatctaagatagaacctgcagctcttgactgtacttcatttaccaagaaaccaatatttgcttttgccaaatcaatgcttgcaggagaaacacgatagttgaaaacaatatcgttagtcaatgaaacattattatcccacaaatggttcttatcgttaagctcgtcaccaacaggaatattgatagcaactactttagtctgcatatcactatatgtcggcataaacaccacgttcaaagcagctgcagcggcagtagcaggaagaacgattgactcatattccccggtagtctggttatacacatgcaattcatagttatcaccattcttcaccacgtaggtactggttccggcagcagagatacctgtatcttccacttcttttgtctcggtgttataagcaaaccagttaccgttttcaccgatataaggagatacaccagcaacaccagcttcgccagcttgaccaacagcctgatactcggtctttacatcattcttataccagaaaccgtcagtaccaatctcccatttcacagcatcagcaccagcagcaccatctttaccattcgtaatggtataagaagtgttatccgaaaaagttacggtaaaaccaccagtagttggagccaaacttgtaatccatttgccttcatttacttttgcctgtaaagcactcagatctcctttaagagtcgacaactctttgttgatgttgtcaatgtcatcatcatagtctttacaagacacaaatgttcccgttgacgaaaccatcaaggctccgaacaggattgcacttaaaaactttttgttcataatagaaaaactttaaatttataaatttaaaaaactaaaattgattatacatattaatctcattattaatatcttagttcgtttattacctgtagttcccgtttcctcctttcccgtgactgataagacaaaggtgacacacccgcaaccttactgaaagctgaatagaaagcgcttttagaagcgaaaccgcaactacgaggcaagtcattcaatgcacaacgaccgaaactaagaagctccttggcatattccacacgatagccgttcacaagctccttcaagttacagccaaagtatttgtttactacattactcaggtaggtctggtttgtttcaagcaaatcgctcagttttttcagcgaaagcgaagtgtcaaggaatatctgacgtatctcaagctggtacaatatagctttatatatacgacagtccactttacgaatattcgcttccttgccgacaaactcctcctcccaatgccgctgggcggccttgaaaagcaagttcttctgccgctcggaaacggcactacttcgtttacgtcttagaaatagatattccatctgctctatgttaatttcattcattctcatcgcttcaaagacatactttatcatataataaaggaacttaaaaacgacattttctatagatctcttaccaagagatctatagaaagtaactaatgaacaatatatcaacatattatatcctatttcaaataggataaaggagtataaaaatggacttggaagcttattttttatataaattcctattttttttgccaaaaatgtattagttctcaaaactttgcttatttttgcacagaaaatgtatatctcttggtaagagatatacaaataagtatatataaaagaaggaaacaatcaattgttaatcaattgattactatcacaaaaaagagattctctccttaaaaaagattcaccgaaataatttgaacaaactctttgaacggaaatcggtcaacaagtttcaagcatcaagccaacttaatcactttacgaagtcaatttctccagaaaaaaacttaaagaaacattatttcctgagccgataaaccggtaacttgggcaatttacatcagatgcaataccgacctgtttcatttttagcattcttccttacgacctgtttcaaatccttcctaaagacctgtttcgagtccctctttaaggtcctcctcacgtcctttcttcaattgggtagacattacgctataccaatcacggaagctcttcaaattttcccaatgttcaccaaactccctagaggtgaatttcgcaatctcggcagcctcgaaaaaacgatcgaatacacggctccgcaacgcacacagacgctcaagaagggaagatagattacgcagaacgaacaggcatttgtcaaacatgccctccaccttatcttccttcttgttgaacttcaggatttcaagaagaaagaacttaaagataagaaaaaaaatacctaagagaaaaaggatttagcataagtataaacacaaataaagttgctttgaaccatacatcaaagcaactttcataaaagccggaacgaatgaaaacattccttattttttctcttcttcgacagaagacagtggcgtactgttctctttataagcagcaaatcctttcacctttgtccgttccttattaacactttccgaagcggcactacccagttgctgcaaattttgcttgatagcatcgtgagtaacaaagaaatgatcgagcatagctttcagatattcgtccaattggccttctttgggagtaaagaccgtatgacatttggaatgaagccccacgtttttctcatcctcatccgccgtaaagacagtggtcaccaacgaatccacattgaccagattgacaatctcttttaagtaaggtaaagccggattatccatactgatagacgcccaccacggattccatatcatgatgaaccgggcctcatcctccaccgcaatataaaaatcatcaccttgatatttaaagacaatatgtccttcctcattggtttccggctgacagcctatctttttgagcacagctataaccagctcttccgtaccgatatcctccaagtcttcctttgtcatacggtccaaacggtctctacgttttttacgctcatgacggatgcgaagaactaaaaatgcaagcggccacaatgccaatgcaataacagcgattagaatggtgaggtcagtcatatctgtttgcgatttaagggttcaacatcaaaatacagatagttgctacactatgctaaacaaatatagcaattataatcttaaaaacatctatttccatcgatttatttcaagtgtttctttatccaaagcaaatgcccgtattctgtgtcttcagaagtccagtgctcgttgactggagtaatcaacgcctctttcggacagttcagtacattatagacaatgtaactggtagtaggaggacaagtattgtcattaaatccccatgtcatataaacaggaacagtaatctgtttggcaaaattcaccacatcataatatgcaagggtcttcatcttggcaggtgtatccatatctaccgtattcttaaaaagatgaggatatcccccggcacggccggctttgtaacctgccatatcacttaaagcgggatggtttgccacacatgccgtaacacgcttgtcaagtcctgccgtaatcaaagccaaagctcccccttggctccccccttgcacaataacatttttaccatcccattcaggtaatgaagtcagcaaatcaatgctgcggacgcaagccagataaacccgtttcatataataattttcacggctatccaagccgtttaccaaataaccgttttcccgactactgaaagcgcggcttatttcgccgaaagtgtcctcatccagctccggattcaagccgtggatttctatctcaaagcggatacagccttcttccgcataatatttatgcctcataggccctttgatcgtcttgataccggcccccggaggacaaagcactaccggatactttccttccgccttaggatagaacagataaccataaatacactggttctgcttattcagctgaagtctgatcaagtaacagtctattttgtccgtagaatatttctctacgtactctttagtataagtcagagggaactgggctgcttccgccttagtcttattccagaattcattaaaatcagaaggcaactgggtatagggttgaagcttctcaggagagaagccgactttgatatggtgggaataagttttacctcctagtttagccgtcagacgacaatcacgaaaaccgggctctttcattgtccccatagaaataaccgcttttccattcttcagttttacagttcccttggtatccgaaggcatcatgtcgcctcccagctcatataaaacctccacaccatcttgcggaataccatatttatagaactgaacctcaatcttcgctttctcgcctgtcttgtacaaccagtcggcatgatcgggtacagttacccaaagcacatcactccgataaggataattttcggccgctgctgaaagaacgaacaagacagccccaataagcatgcttaaaaatctgtttttcattgtaattctatttaatggttctaaaaatcagtattaaatctgcgtaactccgcacgcaaggcacgagctctccctcctgtcatactatccagcaattcccaaaaacgaggaccgtgattcatttccttggtatgagacaattcgtgtaacagtacatagtccatcaaatggggaggcaacaacatcaaataacaggaaagattgatactgcctgtccccgaacaacttccccatcttcccttgctgccggtaatcttcacacgtttaaatggcaaatgatactgttcggacaaggcagataaaagagatggcagatactcttgtgcatttttcttcatggcacggatgatggcattacgtaccagcctttgtacttcaggtaaagaaaaatccacattcctcggacagataatcttgactccctcctcggtaaaacgtacggaaaagcaagtaaagttaccttgctccagccataaacggaaacagggagtgtgaatacgaaaatttagatcaatcggtttcttgctcactttcctccagtcctccaacagacgttgcctgtattgctccaccacctccagcactttgctgcttaaactataaggaggaacagtaacatgcagtccgtcgggctttacccgcatagtaacattacgcgccagcttgtgtgtacgcactataatacggtcaaaatctttatccggaagtactcttttagttgccatacggatacaaagatacagctttccaataaaaaaaggcagagatttgcaactttccaggaatcttcaccgtctaattaacagaaaccaattaaatatatatattaccatgagaacaaaaactatttattttttcagtctttttctgacaatcacaatgatgacaggctgtttccacatatcatcaggcccgaaacccagcaagagtaaaatgaccaaaaaatatagcgtaactcctttcaataagatagagaacaaagcacctgccaacattgtctttactcaagggaatgcgaccaaagtagaagccgacggtccggataattacatcccccaactcattgtcatggtcaaagacagtacgctgagtatcagtatggataaagacaaattcaaaaacttcaaaagttcaaaaatcaatatctcaattaccagtccggttttatgcaatatcaagcaaagaggtgtaggaagtatttatctgaaagacagcgtgaaagtaacagatctttctatcagtgccgaaggtgtggggagtattgaagcaaatgcattaatggcacgttccatcaaagtatcccaagaaggagtaggaagtatcaatttaaaggggcaggccggtcatgcgacatattatttggaaggagtaggcagcctgaaagcaaaagacatgattgtttctgatgtggtagttgaacaaaacggtgtgggaagtgtttcttgttatgcatccgggacgataaatatcagtgcccagggagtaggaagtgtaaactactacggtgaccctcgggttaccggactaaaaaaatccggaatcggaagcgttaagagcaaataactcatttcataactctctctttacattaaattatctaccaagcaaaaaaggattactgctcacgcggtaatcctttttaaaattatttagttagttaatttaaaatttgagagaattgaaacttcacagcctcgaattaaaaagttgttttaataagcactaactatcatatttatataaaagcaaatgaaaatgttctaatttgttttccctgtccctgtaccggtatcatcagcggtaatctttgtcaccgtatctgtaggcaatacaggttcgtatgccacttggggatcggtagtagaatcctgatactcatcgtgtaccgataccgtatcactatcaccgccttccatagcgtgttgcatcactgtacccataagaaacaacacggcaatcattgcagccgctttaaacagaggcataaagcgcgtacgcatagtcagacgttgcgcttttaccaccggtctttctatccgggtcaggattctggtatcaaaatcatcgcccaaacctttctccttctccacatcctgataagcaaacaactgcttgtaacggagtaaatgagcaggcacttccttctgacgaaagaatgaacgtagtatttgctcttcttccaatgaagtttcgcaattccaataacgttccaaaagctgttcaatatatttataatccataatcctctatttcagtgtatctttgttttatcttctgccgggcacggaaaagggttactttcacctgttcttccgtaatctgcagaatatctgcaatctctttataactctttccttccacatccctcaactgcataattgtacgctgtctttcgggaagctcattgaccagacggtgaaccaactgcatttgttcgttctgcgccaaccggtcataaggcgtcaatgtatcaggcatctcccgcacttcagaggtcagttgcaaattctgtgcttccatcttctggctgcggtcaattgccaagttacgagcaatggtcaggcaatatgcctcgatggattcaaactgcggccattcatcccgcttgttccataccctgatcatcgtatcctgcaccacatcctccgcttcagcactattcagcgtaatacgaagcgccaacctgtagagtttgtctttcaggggcagaatatcgtttcggaaactgatctctcgcattgctctgtaataatgacgggtgagttacactaaagttacactcacccgcctgttttttttgaattattttttgattacggttccacttccttcattaatggctgatgctaaggttattaccacctgactgactcctgcatcaatggcagaaaaagaattttccagcttgggaatcatccctccttgaataatgccttgcgctacaaattctttaaactcttcaggagtaatgacaggaattacactgtcatcatcattttcgtcacgcaatacgccctttttctcaaagcaataaaccaatgtcacatcaaacaaggacgccaatgctttggcggtttctccggcaatggtatcagcattggtattcagcatgcttcctttaccgtcatgggtcaatggagccataacaggcacaatgccctgacggatcaatgtcgccaggaaaccggcatttactttctccacatcaccaacaaagccatagtccacgtcttttaccggacgctttaccgaacggatcacattcatatcggctccggtcagtccaatggcattcacaccttttgcctgaaggccggctacaatattcttgttcaccagtccgccatataccatggttaccactttcagcgtttctgcatccgtaatgcggcggccattcaccatcttgctttcaatccctagttgtgccgccagtctggtagcagagcgcccgccaccgtgtaccaacaacttataaccttctatagcagagaaatcagccaacaactgattaagtgtagactcttcctctacaatttttccacctacttttatgatagtcagtttctctttcatactattattccaaataagtatatccgtacaacccggaacgataattagagaggaattcttttccttcctctacagaaattcttccttccttcactgatttggtcacccaggtttccagtgtacgcaccagtttcttcgggttatattgtacataatccaaaacctcggccaccgtttcaccatcaattacctgatcaatagaataccctttgtcatccaccgtaacatgcaccgcattggtatctccaaacaaattgtgcatatcacccagaatctcctgataagcaccaaccaaaaatacacctatataataagcgtcttttcccttcaacgaatgtaccggcaggtcatgcgatacataacgggtagagataaaattggcaatctttccatccgaatcacaagtgatatcctgcaaggtagcatttctgtcgggcttctcatccagacgctggataggcatgatagggaatatctgatctatcgcccacgagtccggcaacgactggaacaacgagaaattacaaaaatatttatcagccagcagtttgtccagtttgcggaactcatcgggcgcatgtttcagccccgaagcaatctgattgatctcacgggtcaccgaccagtacagacgctctatctgggcacgggtcttcaaatccacaataccgtggctgaataaatcaagtgcttcctcacgtatctgctgtgcatcgtgccaagcctccaccatacggctctgattcagattatcccatatctcataaagttcatgtaccagttcatgatcattttcacccacttcgaaatcctcatccatttcgggcagagtcgccgtttccagcacctcgaaaatcagcacggagtgatgggcggtcagtgaacgtccgctttcggtaataatattcggatgaggaattccattcttgtcactggcatccaccagtgtagagatagagtcattcacatactcctgaatagagtagttcacactgctttcactattggcagaacgagttccgtcgtaatccacacccaaaccgccgccgatatccacaaattccacattaaatcccatcacatgcaactgcacatagaattgcgatgcctcacgcagagctgtcttgatacggcgtattttagtcacctggctgcctatatgaaaatgaatcagtttcagacagtccttcatgtctttcttttccagaaaatcaagcgcttccagcaattcactggatgtcaagccaaacttactggcatctcctccgctatcttcccatttaccacttcccgaagaagccagcttaatgcggatacctatgttaggacgcacattcagctgctttgccattttggctatcaggcgtaattcattcattttctccactaccaagaaaatgcgtttccccatcttctgtgccagcagagccagctcgatataactttcgtccttatatccgttacagataatcaatgaatccgaatctgtattcacagctatcaccgcatgaagttcaggtttggaaccggcttccagtcccaaattgaatttctttccatgactgatgatttcttccactacaggacgcatctgatttaccttgataggataaatgataaaattctgggccttatacccatactcatcagatgcctgcttaaagcagttcgcgattttttcaatacgattatccagaatatccggaaaacggaccagcataggagctgccacatcccgcaattgcaactcatcgaccaactctttcaaatcgacctcaacgccgtccttacgaggagttaccactacatgacctttgtcattgataccaaagtacgaagttccccaccctgttatgttgtagagttcttccgaatcttcaatacgccattttctcatttcttcttctgtacaaagagtgtgtattttactatatataattatttattcaatttctttctcaagctgtcaacagaggcttgaatttgtcttttatcctccagctcatcagccttaaacagatgtttcgcctttgaataaaacggatgtcttttctgtaacgcctcacagataaaatccatcagttcctcatcacttttatttgctaacaatggacgttgctgcttggccactctcagacggcggaacaatacggcaggttccacatccagaaacaccgtatcaccgcaatcattcatatactccatgttatcaaaaaaacaaggtgttcctccaccggtcgaaacaaccacatcttcaaactcggccacttcgtgcaacattttccgttccagttcccggaatccgtcttctccgcgttccaagaacagctgttgaacggttttatggaaacgttcctcgataaaccagtccaaatcaatgaaattcagactcatttcacgggcaaacgccttacctagagtcgttttgcccgcgcccatatatcctattaaaaatatacgtgtcatttttttgcttttgcagtgccctttaccttggaagccgccttactttttgcggattcttcgggcttttcggactcctcttccatattcacggttcccctgtttcttgaagccgctttcgttttacgcgtttccgccttgcttttctgcaattcaatcaccttaaaacaagcctccagacttaaatctgccggttctacattctcaggaatcttataattctttttctgataactgatgtatgggccgtaacgtccgttcaagacctgcatatcagggtcagcatcgaatactttaataaacttcttctcctgcgcttctatcttattcttgatcaactctaccgcctcatccaaagaaatctccatcggatccgttcctttaggaatagaaacaaacagtttgtcatagcgcacgtatggtccgaaacgccctactcctaccgttaccgtatggccgtcataatcccccaacgtacggggaagcttgaacgcatccaatgcttcttccaacgtaatggtttccatcgacaatccctttgccaactgcgcaaaacgcggtttttcctcatcatcggcagtaccaatctgaataaccggaccgaaacgaccgatcttaaccgataccggcttaccgcttacaggatctgttcccaataccctttcacccaccttatgctcagtcttagagtgaatggtcttatctaccaacggatggaagcctttatagaaactgtccatcatgccagtccattccttttctccttccgccacttcatcgaactctttctccacattcgctgtaaagttaaagtccatgatttcaggaaagtattccatcaggaaatcgtttaccacgataccggtatcagtaggcaacaacttggccttttcatttcccgtcatctctgtcttggtagtttccgtaatcttgccgcctttcagtttcaagatatcatacgggcgtttcacaccttcactgtttcctttttctacataaccgcgttgctgcacagtagaaatggtaggtgcatatgtagatggacgaccgatgcccaactcttccagtttgcgtaccaggctggcttccgtataacggggcggacattgggtaaagcgctgagtcgccaggatttcttttcttatcagtttttcccctttgctcagaggcggcaacagacggccctcgtcttcctgctcattgtcatcatcgtatgattccttgtatacacgcaggaaaccgtcaaaagtaatcacctcgccggtagcgataaatttctcgctactgttgctgattacaatagtagccgttgttttctccagctccgcatctgccatctgtgaagcgatggtacgtttccagatcagttcatacaatttctgctcctgaccggttccgttcaccgtttcattctccatataggtaggacggatagcctcatgtgcttcctgtgctcctttagtcttggtggcaaacttacggactttgacgtatctttctcccatcagggacaagatagtctgcttgctggtattcaaagccagatccgaaaggttcaccgaatccgtacgcatataggtaatttgtccgttttcatacagacgctgtgccaccatcatggtctgcgctactgtaaatcccaacttacgggcagcttcctgctgcaacgtagaagtagtaaacggtgccgccggcgatttcttcactgggcgggttgttatatcttcaatagagaactgcgcatccttacaagtttcaaggaaagcctgtgcttcttccttggttttgaaacggttggacaattccgctttcacttcaacttcatttccatcgacatcaggtacttcaaacactgctgtaacgcgataagacggctcactgacaaaagcatgcacctcacgttcacgttccacaatcaaacgaacggcaacagattgcacacgtccggcagaaagagcaggctttaccttcttccacaataccggtgagagttcaaaacctacaattctatccagaatacggcgtgcctgctgggcatttaccagattcacatcaatgtcacgcggattttcgatggcctttagtatcgctgttttggttatctcgtggaatacaatgcgcttggtcttctcagggtccagccccaagacttcaaacaagtgccatgaaatagcttctccttcacggtcctcatcggatgcaagccataccatatcagctttctttgcctccgctttcaattcggctaccaatttctttttatctgccggtatctcgtaagtcggctcaaacccattctctacatcgatactaaactccttctttttcaaatcccggatatgcccgtaactggaaaggactttataatcattgcccaagaatttctcaatggttttagccttggcgggtgactcaactattactagatttttttgcataatactatgtattccattttattttggggcaaaagtagaaaaaaagcagaagcacacctatataataaggtatgtttctgcttttttttcttaaaaaaatcctttccgagtgcctatttaactaaaaagccaaagaaagcccggctagaacattcagtttttcagcaggatagccgtactcataataatattgtttattcaacagattattcacacgcccaaaaacagacagatctttcaggaaagtataactggctcccacactcaaattgctgatattgcccaaaccaaaatccttgctgctattcccttcttctatcacatattctttccgctgtacatattcatatcccaaattaaccttcaatccttcaaaaaccttagcctcagcatagaaattcaattcaaacttgggcttggtcactaaatacagctcttcattttcattgtctgtcttccagctataaaatgtacctttcaatgaagcgtcaaaccagtccttataaccgtatttcaattcagcacctccatacgcggttttcgctttatcctgcaagaaatgagtaaaataatacccgtccgcatccaccagattgcaaaacaactcatctttactgatccgatatccaccaaagacattaaaccacaaaccatttaccggagatgctttaaaacccaatgtagcattcagtggcacataggtagaaggcatccgggcgtttaaagaccaataaggtgaaaaagcattcaaccggcgataatcattcagttcacgccctcccagcgcatgtaaataaagcacataactctccgagaacaagtattcggctttcacgtcaggagacacatcaataccactgtcctctcccgactgccaatccacatgagcaccgacacggacccgccagtcatcactttccaacatataataaggattcaaacccagtgaagtatagttgcccattaaactgtccgaagaataaaacaggttatccatctcgaaacggatgcctacccgttgctcattatccagcttgccccatacatctccttcggtgtggacaatcttctccttacctgtagatgcattgcctgaataatccagcggatatttgataccaaaatacttcaatccggtctgcaaagtgaattgcaaaggaagcgattcatctctggaagaaacacctatgtgaaaatcgcctaaagtatgatgctgtttatcagtagctctggcagaagccgtatgcatttcggaatcaggcatatagttaaacacttgtgattgcaggccgccacctaaattcaaagttaccttgctgaaatcatgagaatagtccaaacggaactcagtagaataaaaacgtgatttccaatcctcagcattccaatgcttcagctttccgttcatgccatccaaagataccccgactttcagacggtcctttccggtgatatcccacagatacccagccttaaaatccacattcccataatttccatatccggcacggacatatccacgtttcgcgcggttcatagcccattcacgggttataggagacatactttcatacgtccaggccgaaacagggcgcaaggctgtagcatattctatgcctttcttcattacagccggctcctccaccctaggcaggacattaatctttgaggcatccatgatattgggattatactcattctctaccaccacagtgcggttcaacgtactatcttgctgcgcatatgcaacagacagaggcaaaaaagccaatataatggacaattgacaatggacaattgacaatttcttacttatcatattcagcacttattttttaatttttaattctctgttttcaatttctccagtctgctttcaatcattccggcaatatcatcatcggcctgatagttctgcttcaatgaaagcaaatattgtttagcatccaagttacgccccaacttcatatacacatcagccaataacacaaagctgcgtgccagccaataggtatgcggtgtacttacctcaatgtaattcagcacctcctgctccgccttatccgtttgtccgccgtcaaagtaaatctgggcgactttatatttggcctccgctccatatacattacgggtgtctttcgccaagaccttcaaatcttccatagctccatccgtcttgccggcatccaaataagcttttgcacggtaataatgtgcctcgttagacaattccggcgccagtttagtatcggccagcaaatctgttgcggcaaagataatctcttcctcatttcccagcatatgcgcactgcgtaacattccggtttttgcaagccggcgacgctccatagaagcggctttatctttcaattgcttgtaaatatgcaaggctttttcataatccttcgccgtataagccatttcggcccccatcaacatggcatcttcagaatatttgttgttgggatattccaatactttatccaaatgccgggctgcactttcataagctttctgattatagtctatcaaaccgatataatagttggcattcagactgaaagcaccttcggggaaagtctgtaaataacgggtaaagctgttgcgggcctcggcgacctcaccccgcatatataccctttcggcagccacataggtcaatgagtcacgctcattcacatcaaagttggcaccgccggggatagttgaagcaaaattggcatactcatccaccttattcaaatcaatatagatcgatttcaagtcacgctgcgccaaacgcgcctcctcactgcccggataaccggctatgacctgcttataagcctggatggcttcaggatacttgtcatcctgatagtatagcaaaccgatctcgttagccgcccgccgtgcgacattgctctccggaaatttcttcaccagaatattgaaacgggcaatggcattggcattatcctccatctgcacaaaagcacgtccctgctcgtaaagggcatcatccatgtattgtgattccggataatccgaaatcaagcggttcaacgtctgcacttttccattgtaatcacgttgcaaaccacgcacaaacgcctcctgatacaaagagtaatcccccagtgacggatcaatctccaccgcacgggcataatcctgacgagcctgttcaaaacggcggtcatagaagttgcagtcacctatgcggttataggcatctgcctgcatggtgcgttcattgatacttcccctgtccacaaaacgggtaaaccaagtgcccgcatttccataatttttctgtttgaaataagtatatcccaagttatagagcgccaaaccatattcctgtccgttcttgctggtggcaaattccagatacaagcggtaatcgttacccgcctgcggaaaacggtccagacgataattggattcccccctccagaaataagcgtccgcctttgtcgcctgattgtattgccccacagcaagcgattggttgaagaactccagagcctcctggaaacgggcattcgcaaatgcctgtgtgcccagccggaacaaaatcttctgcttggcctccataatgcgtgtgcccggatgctcaatctttgctatagattttaaagcagcttcataactgcgggtattcatatacacctctatcaaataatcattgacacgctccgtataaggtgaattcgggaactcattcagaaaacgctcaaacacggttaccgattcggcaaatggagaataagaggtttcatgaatacacaaagcataattataaagagcctgttcctttactttcggatcaaaactgaaattggcagcctgctcgaatgccatgcgtgccctgttcctctccttcaagttcaaataagccagccccatgtgtagataagcattctgtgacaaggcatcatgtaccgaagccatttcccccaaagtagcggcagccttggaataaacaccagtataataataactcataccgagttcatacaaaggcttacgctgcgggtgggaaacactttcacggtatctttccaaaggaggtatcgccgcttggtaatcattcaatccgaaacaagcctctccccaaatccgttccatctgaggaacatcctttttagccggatattgctccagatacgcttttgccacagtacgggcctgctgataatttcctttcaccaaataaatctctcctatataataaggaaccaatgctgcatatacggcatcattctgcaaagactggaaacttttcagcgccttgtcatagcgtttctccacataatcaatataagccagattatagacagcgtcatcctgatacaatgggcttacctctttcagcaaggtaaaccatacagccgcttcacgcagattgtcttctttcagataagaggtggccagacgcatggcacaatcatctctttccttatcaggcaaagcctccagatcacacgaccggaacagggcaatggcctccttgtattttccctccataaaataagcagaggcaatcagtgacagcaccctgtttttatggcgggaatcaggatatttgtccagataagcctgtaacagctccatgctgtccccgcctttcaactcatattcccggcatacccggttatattccttgtcacctgccacatccttgggagtgatctgctgcgccattccctgcaaggaacagcctcccatcaatgcggccatcaataaggtttttcttttcatatcttatcattaaagtttatgttctttcaaaaaacgccggactccttcacgcacagaatccagcccgaattcttcgggattcacttcatccaacggaagccagaaagactccgccacatcatccatcgcctttatccggctggtatctttcactttacaaagaaagaacagatccaatgtatgtaccagaaatcctgaataaagataagtgttgggcaatgagaactgataaacagcctcctccacctgcaagccggtttcttccaacacctcgcgtgccacaccttcctcgccggtctcatgcatatcaataaacccgccggacaggtccaatgttccctttgccggttcttttcccctgcggcacaccaacaactcattcttatcattcaagataaaagctacagtagcggcactggaattgaaataatacacaaagccacaatcggcgcaacgctttgatttctcattgttcacttcaaagtgcggcgaaccacacttcggacaatatttgaatagttccaacggatgcataattactcctttctaagtatagacaccgcaaagatagcgcaaatgacagataattcattaattaaatctaaaagaagaaagagaaaacacaattcttagtacatttgttagcaaaacaaaacgtaaattcttacatggaaattgccattattatcgcacttatcttattaaacggggtattcgccatgtccgaaatcgccctgatctcagcgcgtaaaagtagtttgtccaatgatatccgtcatggaagctctacagcgcgtatcgctttaaagcttgccaatgacccggacaagtttttatccaccatccaaatcggaatcaccctgattggtatattgaccggtatttactccggcgacgtgctggccaccgactttgggaacatactgactgacgccggcgtacccgccacatatgcctatttattggctcaaaccctgattgtcatcctggtcacttacctcactattatctttggcgagctggtgcccaaacgcattggcatgagtgcctccacccgtgctgccaagctattggcacgtcccatgtactggctgtccgtcatcgcctctccttttgtatggatacttgccaaaagcacttcacttatcttcaacctgctgcatatcaacacagcggaagaaaaagtgactgaagaggaaatcaaatccatgatagacgaaggaaccgagaacggtgaagtgcaggaagtggaacaggatattgtggaccgcgtcttctccctgggcgaccgcagtatcaacaccatcatgacctatcgcagcgatatcgtatccattgacatagacatgaacaacaagcagctgtatgacatcgtatgccaacacctgtaccaagtttaccctgtaactcaaggaaacaccctggacaacatcatcggagtagtttacctgaaagacctcttcgggaagctgaacagttgcgaattcaatctgcgtgatgtgatccgtccggcacaatacttccacgaaaacatggatgtatataaagtattggaacaaatacgccagcacaacatcaaatacggattaatctgtgatgaattcggcagtctgcaaggcatcatcaccatgaaggatattctggaagccctggtaggcaccttgcccagtgactcggaagatcccgatatcgttccccgcaaggacggaagctggttgatagacggccaatgttctttctatgactttctgagtcatttcgaaatggaggatttataccccgattataattacaacacgttgagcggcctcatcctgcaacaactaggccacattcccaagaccggtgaatccatggaatggaatgacttcacactggaaatagtcgacatggacggagcccggatagataaagtattagtaacactaacccataaaaacgaagaggacaattaacatgctgcaaagagattacattatgcggttgcttcaacaatttttcgaagcattggaaaagttggtagaagaaagagataaaaaggacggtcccgagctgcaattgcaacttcaaagcatttatcgtgcctacttcaatcatccttccaccttctattatgatcaggatgcggaatatatactgaacgagatgggacagaactatggtggcgaggaattgctcacgcgcatcgacatgttatccgaactgctctatcaggatgctttgttgaaagagtccgaagaacaaaaatatttgttaagaaaatcgctattcctgttgaactatttagatacacatagcgataccttctcatttgaaagaagagggaaaatcggcgaaatagagaagaaaataggtgattagctcctcttattgcactttttttcaaagaaatcctgttttttcttgcaaaatagtagataaattaaaaagtattcctatatttgcttacagattgataacattaaaatcggtatattatggagaaaattgatagtctcgacagacaaattctagaaattatatcccaaaatgcccgcatcccgtttaaagatgtcgcagcagaatgtggagtttcacgcgcagccattcatcagcgtgtgcaaagattaattgatttgggagttattatcggttcaggatatcatgtgaaccctaagagtttagggtatagaacctgtacatacgtaggaatcaagctggaaaaaggttccatgtacaaaaacgtagtggcagaactgaagaagattcccgaaattgtggaatgccacttcactacaggtccctataccatgctgaccaaactttattcacgcgataacgagcatttgatggacttgctgaactcaaagattcaggaaattcccggcgttacggctaccgagaccctgatctctctggagcagagcatcaaaaaagaaatacccattcaaagctaagaaagaatggaatggctgaatgaataccatttaggcggtattgccatcggcatttgtacctttttaataatcggtcttttccaccccatcgtggtcaaggccgaatattattggggtacacggtgctggtggatatttttggtactgggcatagcaggcattatagggactgtgcttatcagtgacatcctgatttcctctttattgggtgtcttctccttctcttctttctggactatcaaggagatattcgagcaacgcgaacgcgtgctgaaaggctggtttccgatgaatccaaaacggaaacacgaatacgaatagaaactattctttccggccaaaccctttgcaatccaattaaagggcttttatttcttcttcaggaagccctgtagcctgtactatgacatcagatgacactctcaagtttcgcgcattcctcatgcgctcttcgtaaacgtttccgcgattctaatatcatacgcatcccgtgcctgcaacatatcaaacaaaaattatttcacaactttatcccctgctccgtactctgcaaactcttcttattcctatatttgaaattctttccttgcatataataattgaatcctaatgaaaagcagaaacttcggtccttcatcctgccggatgagaaattgtaataagttccttcgtgcgtagtggaatcataccccaaagtgcccaacaaatacctcatatttccagtaattcccaaatgtttgttcacacgccaagttaccgtcagttccgattcagacccataatgtttccgtttgttattcacaccatagctgaaaggccgataattcccataaagattccatgacaatcttttataatgtccatacgtattaagattaacataaagagagccctttccatgctgatgagtatagaaatgagtatcataccctatatttccacctacacctccccatttttgattattatagttcatattgataccggcatccagttgccggaaagtatccgtgtttttatatgtctgcgtatatatattgtcctctgtataccctatcggcacaatccggtctaccgacaacctgtatttcacaaaaggttccacataaaatccatgctgattatacatatagcaaaatctaaaaatatgattccgggcaggcattaaaaaaggatttccccgagtcacttccaaactgtcggtagaagtgttgtagggattcagatacattacctcaggagacagattggaaagattataattcaaacgtacagagtgtatgccattaaatttataagttcctgatacagcagcagtcaatttgctataatcgtgtttcacttcacctgctttcttgaaaataagatccgtacctaacgaaagcatataaaaaaaactgctcttgatatttccattcatcgaaacataagcatattcactccattccctatgatagaaagtaggatatcccgcactaatctgtttaatacggtctttcaaaaaacgagtataacttccgaaatcaaaattctggccgagccaatcaaaagaataatccagttccaatcctccggaccagcgaaagttgtcaaaatcatattgatttctatactccaaggatggatattcctcttttctaatccctttcatatcattcccattcatgttcagatgcagagtcgtttccaatgttttacttttatgaaaggtatgcttatgatacaagttaaaacttcctacataactggttgatttattatccacaaaagatttatatgcttctctctctttattttgggtcagaattcccccaccctcctcttcacttttagaagaataatggtaatagatggcactcatagccagataatctttgggcgaacaaatccagtcaccgttcaaagccacataaggattacttatattagaacgttttttactgacagcggttttctcataccccgtattctgttgtatcgtattccactccgaatcatcatgatgaaaatagaaatgagaagcattcaggcttaaagacgccttgctgttgcctaattcataataacctcccgtatacccaaacaaaaccggaatcatgtggcgtgtattcatattgtatgtctgataagcggcagttttctgtttcatcttaatattgaccacacattgtaccccgtctttcaggtagcgtgcagaagggttattgatcacctccaccgcctccacctctttcgggtcaatgctattaatgcccgaattgaccttatgtccatttatcaagattaaaggaatagccccatccaccatctttatagaacgatccgattcattcaccaccaatttgggaatttctctcaatgcctcataaggattctgttttttcctggcttctgccgacaaataaaagatatcactatttgccgtatgagagatcagatgacttttgtcggcaacaatagaaacttctttcaactgtatgtttttcaccggataaatcacatagactatccttttatcacctgtcaaatcaaaggtttcctctatcggctgatactcggggcacgacaagcttaaagtgtatttccctttgtgcaaatcagtaaatttatatctccctttcgaatctaccagtgtcatgcctaccaatgaatcggcctgttgcaaggtcacaaccgtttcaggcatcaccaaagatttatcattctttactgtccctgacaaggtgtattgggagaaaacaaccaacgggcaacaacagactgctatcaatatgattagtttgtcaaggcgtgctttcatacatattcattttaagtagttcgttattaaatcgatactccacatattcatccagactcaattccatattcctcaattggcaataccttagaatattccctggagtttctaacaatttttgattgcaaggtccccaacacaaaggtaataatttacatgatatacagtactcattatcatacgttgtttgcgataatcttttctccaactttaggttatcccacttgatacagccattatcctgcaaaactccttctcgcaattcattggtaaaatctctaccactacatttatatacatctccattatatgagataatagcctggtcaactttaccagatttacatgaataacttcttctagccaagttcatgtatgaaactgcaaaaccatttaccatgaataaattcaaaacatcttttattttataggatacttctttttccggtgaagtctgccaaactctttccatgtgtatacctatttttcttctatcgatatcaataatatcttttataacctcttcaatatgatttaatgtatcattatcataattgattctcaaatttatataggtatcataattattggctaactgatgaataacttctataactttatcatacgtaccttctgacgtattaaaatatctttttatcgaattatgtttttctttatatccgtctattgagatttgaaaacttgcatgtaaatcttcaaaaagagaaagatgctctgaatgaatacaagttgcattagttacaaaaaagaaatgtactcctttattatgctcttccgctttacattttatctgttttagcaatggatataattctttcttaaaatacaataatggctcaccaccaaacaattcaagatttagaaatttaatatcatcacggcacaatatactatctacatagtttaatatcaagttttgagttatcacatttaaatgactattcttaatatgtttctcaaaacaataccaacaacgtaaattacaatctaaagaaggcaatagtgtcaattcatacgttccatttataccaaccgccttactatgttcatttttcaataaagcaagttcatcatcctgctcaatcaaaaaaccactcttaaacaaatattttttttgcctatcactaatcttatcatattcttctgcttgaattaactcgtacaattcagctgacataaaagaatagatatcatgaaatgtgttaaaacaaatcacaccatgtttcttttttacatatatgttatatttacttgctttcatagattatatatttaaagataacccaaataaaagaagatatctataaactaacttacttatagatatcctcctctagtaattacttaatgccattatagaattaaatcaacagttatgatacagatattattgaccttcacagccatttcctgcttgtccaccgcctccaccactacatccacaaccagcaccagaactacaattacatccgcaacctgcgccagaactacaatgacaaccacaaccagaccccgagtaacagtcacagccacagcctgcaccactaccagcatcatttccaccaccatcattacctcctcggactaaaagcatctcatcatcagacaaactaatttgattaataggcagtaatgactctttaaatgagacaaatgttttattcataataaaaagttattaagttatatgccagtaactaacatattcaagaaaaataccatttttacatatcttcttctggatcatatcctgcaatatctatccaataccattcacctgctatataaatccactcacctccttttatagaagataactgcaaatttgaaagctgttctatttccatatcaatacctccttttttaattcacaaaattaaaaagttagcataagaaaaatattaatcattatgtaataacttggtaattaatttatttttttttgattacctttgctcctattctaaattcatctaacaatgaaaaaactgatatacacacctatattaatcactatcgttttattctgtttacaaggattatggttaaacaaaatacatcatgcctatatgaaacaatccatgcaaacaattcaacaattgctttcattaagcattgctaaagaatcaagcttacgcaattattccttacctcaaaaccctaaaaatcctagaatcatctatcggcatgcaaatcaaattacagaagaagaacgtaaacaattaaaaggagatactataaatttaaactcattggttagcagaaatataagtaacaatatggctgaagccatattacaattacaacaagacggattaattaaaaaaaaatcatttatccaattaacaaaattagatagcattttccgacaagaattaaatacagcaaatatcaatattagccatcaaatcctgctatacgataaagatacaattgtaaaacaaagcatcggagcattaccaaccaacgccctatttataaaaaaaactcagctttaccctattggtaccaagggcttacaattcattcaagtaaaagcaaatgttccattttcctctttcatacaggagatgttacaaatattaatagaatccattctactcacaattatcattctaggatatgttatttttttagtcataaccattcacaagaaagacaaactgtttaaaagacgggaagcaagtgtaaacggaaccattcacgatttaaagtctcctttaaacagcattatcacattaatgagttttatcaagaaaaaagtacctgatatccacacacaacaattagtggaaaacaccgaaaggcaagcacaaaaacttgtcaacgagatagaagcgctactcatcacagcccgtaaagaccggcaaaaagtttatcttcaaaaagaagaaacagacctagtactcttggtaaccgaagttgctcaagaagtttccatgcaacattcccatcagcctcatcaaataaaaatggaatcagagctgaatgagttaaaccttatgttagatcccttatatgtgagaaacgtcataagaaaccttgtggaaaatgctctgaaatattctgatgacggagtacaaatcattatcagaatttcaaaaaaagaaacccaagcaatatttaccgtaaaagataacggctggggaatagcccccaaatatcaaaagaaaatatttactcaattcttccaagtacccagagagcaaatggcacatcaaagaggatatggcataggactagcctacacaaaatatataatagaagcacatggtggcagcatctccgtagaaagtattcctggaaaaggtagtatttttatttgtaaatttccacttccatcttagggcagaaagtaaagggtataaataaacattttatttctaaagacatcacgactgcacgtagaaatgaagcagctaaaataaatcacccaagtaggttaacagatattacgactttcaataaaataccaaatttatatgtaacaaaaaatgcaggtctaaatttcgcatattttctttgacaagcttttaacatgatttggcctctctttaatatggcataaattcatttttccaatcatactttcatatttcgaaggaggaggacataaatattgataaatacaattactacatggttttttattacgtattttcatccaattattcctttgggtcatttctttataaattaattcttgaatcgaattctgacttaaggaccctaaacttcgctcgttgatattactatatactttattattaggcaatataaacagttgtccaaaatttattttgttaaggacactattagcaaaaatatcccacttaccaatgggatattttagtatatccttttcaaatgaatatacatgtttttcaaaaaaagataaattcttttcattgtaattaactgtaaactgatacctctctatattataatcacatatgagagattttgccaattcatattgtctgccattctctaacaaaaaattaaaatttgcctctcttgcatattgggctacttcttgtataaaatacacctcatcaaaattagatgtaagattaataaatatattcagatttttcaaatcccatagtcctactgttgaaagaaaattgattttatgcaaacgccgataatccgtatttattataattctatttttaataacttgctctccataaaaagtaatcaattgtgaaatcaaagcatctattcctggaagctgaagtattacagattgtattttaataagactagctagttgattcaatgttgattcttttaaaataatttcttcttcatattcataaaaatagatgcttatatatccttttttgcttttagagcttaaagggtagatatgaatagtattaatatatgcagttaaatttacctcggtttgcaaagttgagcgaagtgaataattctcctttcgcaagttaaaatccatcgaaaaaggaaatgaaaaaggtaacacttcagatacggaattcatagagaaataattacccataaatttatttcttatactataaatcactttccataattgtttgctcatatctgcctttttgatacattggctataacattttgaatttataaaataagaaaaaactttaatacaactcatatcgacgaaacattttatatattttccatcaatagtattatataccaaaagatcatttccttttagagcaatatatgtatatgtttcaagataaaagcagatataggcaggcttatttttcatatttataatatttgtacggattcaacattttttttataaaagctacgatgggtttcaaaaatggaaatatattctgtaagttctttttgtacttgagaataatttgtaaaatttggacatgaagcattgtttcttatttcacaataaatacatgttggacaatttttatattggtaacactgggtacacaggtgttttacatcattgtataacattgaatatctctttattgccttcgaatctataaagatattatcgtcctgtatataccctaaaggtgaatcatgacctattcgttcacaagggaaaagcttgttatttacagtcatcagaattcttctagagaaaggtatacagcttccattatttatatatctgtatacacctttttcttttcgcattaattcagtgaaatcattaaatgaattatctaaaaatcttacagtaaattttttagctattgcggtcagagcactccttaaaaaaaatgcttcttctgtttcttgcttattttttattgaattaaattcatcataaagagctttatacatgccttcaaattcatctttctttatagggtctaccccatgaggattaagagtgccaattgaaggcactttactaaattctttttgaaagaaatccaataattcatttaaattatttctgttatgtaatactgcattaaattcaacattgctattgaaaaaagaaggataacaggtttgtaaccattttactgtattatatacagaactgaaagaatttttcccatgagtcgtattcctgtaactattgttatattcatttccatctaagcttattaaaacatcaaaactcttatctatcagataatcaatacatttcttcaacaataatccattagtggttattgaatatataggagatacattactgggaaaatgactctcaatatatgaaattaattttctaattgcggttatattccttaaaggttcaccaccataaaaacttatatatatattcttttttatagaatttatccctttttctttccagcctttaataaaaaagtctaataatattatggcagattgcaaatcgatatcttttgtatttcttctatcatgattattatacatatctccatacccacaatatttgcaattgagattgcaggaatctgttacttcaaagataatttgtaaagtttctaaaattctatcttttactacttctggagaaaaagtaggaaataagcatttgtcagataagctattaaaaaagccatattctttaaggtattgatattttttcttattgtaattgaattctttggcattaatagacttcttttgtgacaatatatgttcaactgcaaatagtgaaagctctttaccttgccgatctaaattaaacaaactttcaacaataggatccactattgtcaattgcttagtattaaaatcatataaatagtctttctcggacatttgacttttaaaaaaaacacttgactccattttattttaattttatcataatcataacaaggttatcatcctcaccaactcctttgataaatgcgttcaaagaaggagaactgcttttcttcttatttgcgagttttataaaaccagagcaactcatccatgtataaagataattcccgtcagaagttataccggatggtataatgtcaggcccattatctatatcattgacaatggcttgatctgtataaacacatttctgatcgaccctattacaaatgactaattttaattgggaattactagaattgggtggacgacattctacaataaaatatttatctgtttttgtggtgaatgtattatagcagtcattacattccgtctggattttatccggatctgccaagtattcgggcctgagatgaagaggaacagtatatttcccaagatgaagaagaatagctggttttaaattataatcttcgtcaaaggaataaatactatcactgtattcccctttgtataatatgccttccgtcgtagtataaaaattcttatttacattactttcccctaccataatcaccatatttgcctgtggggtaaaattataatagttcggatatgattttagaatatttcccatgctatctataagtgacagtttgttttctaaagctccatacatattagtacggtttatcaacagttttccattttctataaactgcatacggttaaactcttcttttacaggaaatgaattaataaaattgttgtcaaaatcatataccactgctttagtttcattgcctatatatatttttctattattgccgtccacagcagttccatgtacccataaatattcgccaggaccttgtcccctacgcccaatctgacgtataaagttccccttcttgtcaaacaaaagcaccgtattaaaatcattcactacaatattatcatctgtgaaaacgacattcctgatatctctcagaaatttttcctccccactcgcattcatactcccaagctttatataggttattgaatcagctatttctgacaaattaaactgttttcttttcagttcattattatctaatattttttctatttcaatatgaatgattcccttctcgtctatatacaacaattcagaattatttgaactagtacaattggcagtaaccaataccaacagaaataatacgattatgagcactacgtgatttttcatattttagacttaatgtaaagttatatatattttccaatacaaccacagggatatctcaaatttgcaagattaaaaaatatccctgtaaactaaatatatttatgccgttggagcgccatgtttattactataggcttcatttgttgtacgccctcttccttccggagtagttacgataacacaataacaagtttcaccaccaggaggaggagcgtcaccatcattacctccaccacctttaatgaccgcttgttcagtcagctctaattcagatctaaccaattcatttaatttcagactatttttcttcataacaatcattattaataccatttacttttaatacaaatctatttctctctttataagtaatcactcttaatttgaaagctttttaatttccatgttaacacctccttactatctaaattataacaaattaagggaaattacataagaaaatcattaatcatcacgtaacaatcaagtaactattcaaaaagaatttgattacacctgtatctagaaaaatagaatacggagctgacagatataatatttctaataaaaatacaagttggatgtatttccatagaaagtatttcaaaaaaagattgtttcttatttgcaattctctccttaaatgatttcctttgttcaaaacacatttcacacattgccttaaaacataagctatggatacaattaaagtcctgttggttgatgacgatgtaatgctgagcagcattataacgacagcacttaaagacgaagggtatgaagtacactatcaaagttctttaaccggcatcaccaccatcctcaatgaattcaaacctgacatcatgatattagacgttgaaataggaacaggtgacagtattgacaatgcatccgaattaaaaatggcagctcctggtactcccattttatacatatcgtcgcatacagaaagccacgaagtagcaagagcactaaaatccggtgccgtagcctatttgaaaaaaccttttagcgtagaagaactgattgcttatgtagacagacatgctcatcctgtttccaatgccattataaagataggctctttggagttgaacattcaaacacgaaccatttatcaagcatcaaaagaacttaaaagactaagcaaactggaattttccttactcaaacttttatatagtcataaaggtgaaattgtaagttatgaaaaaatagaagagctatgggaagatgctattatgaatgaacacagcctttacaattacatcgtaaaattacgaaagatactggctgccgatcccgatatatctatttccaccattggaggaaacggatatatgctgcttgtcccaatgtaaccaaaatagttctatttagttacttgcttattacaccatcattaacaatgatgcaaaaaggtttctttatttttgccttcagagatcaagaaacaatcatgaaagtatggttattatttatattcggtatagttccgattatctctcaagcacaaaatcgtatgatttcaggagaagtaacggacaaagaatacaaccccattgagtttgtaaccatatcccttttatcggcaaatgactcttctttaatagcaggaaccatcacaaacgaaaaagggaaattcacactttcatgtgaagaaaaaaaggattacattgtccgcgcatctcatatagaatacacaaccaccttcattgccaccggtcaatctacaaacaatatggcattcatactggaaccttccattatcagcatggaagaggtaatagtaaaaagcaatttcatcaggcacgagtatgaccggataatcgtaaatatgaaaggaaatcccatagtgaaaggaagaactataaacgaggcattgggaatgttgcccggtgtcataaacatcaacgatgaactaaggctgaatgggggaaccgtatctaaaatctacataaacggcagagaacttcatgaccgcacagaattgtcaagtctgcaagccacggacatagaaaatgttgaaattctgccggaagccgatttacaacataatgccacaacaaaaggaggaatcatatatatacttttgaaaaaaaatgcagatggcggaggcaatggttcaccctctttgctaggagagatgagaaaaagaaatagtcattgggaacgtttgggccttccattaagccttcggcttgggaaatggaacttttacaacaatctagttctttctaatgcaggagatccttacatcacggaaaatataacccataacagccaccagaatatccatattgtaaatcaaaatatagaccgtaaaaatataagaagaatcaatgaaacattcagcatgttatatgatataactaccctgcaaagcatcggacttaactgtatggtaaaacaagctggaagcacactaaaatcttcttctttttccgaaacacaagaaacagaaaaggaatatacctcttcctaccatagtaaagggaaaggggatgacaaaatatatcaggctagtttgaactataattggaaatcaaaaaacggaaagaatactttgcaaacagttcttgattatttgagaagtgatgaaacgaaagaactgaatcaccattatctttatcagtatccggagaaaaacgaagaggataataaatgtagcaacaccggaactgtttctgatttatggaaagcagaaataaattatatcttcttgctcaacaaacattccaggttgaaatggggtggcgactattataataaccataccaacaaccaaatgtattacgcatatcagagtggagaaggatggcagaaagaagataaaagcgggctatttacttataaaggtataggttatgcaggctatgcagaatatgtatggcaatggaagaaatttacattaaatggcggtatacgggtacaagaggatgaagtgaaatgtatttccaataacatagcaggtgacaaacgcacatatcgcaatctgtttccctccatcaaggtgggttaccttttctctgaaaagaaccaagcctctttatcctattcaaaaagaatgggagatatcccttataagagcatgaatccggctattgtctatatctctgaatactcttatgctaaagggaatccgaatttagtacctactaccgaacatcgtatcaggctattgttgaatctgtcaaatacttggagtataagctacgtttacgcaaagtgcaaagatgatttatttcccctgatctatcaagataaagacaatccgatcatcacctatactatgccgaccaatataggaaagtcttatcgacatgctttttcaataggtttcactaagaccttgttcagctggtggactaccaatacctcccttgatggcgactacactaaagaagtgtcgcccaaacagacctaccatatagtccattgcttattcttttgtgacaacagtcttcgtttcacaaatactttcggtggaagttttaactttatggcagaaagaagaacacgtagaagcgaaacaatatatcacagtgtatacaatatgaatgccggcctttacaaatatttcctggatcaaaagttctgcataaatttatcagtttacgctattttgaataaaagaagaaatctgaccacaattaccaataacaatctaagcagaatagaagaaaataataaaaccccttatcaaggagcgtgcttaaaccttatatataagtttgactttggcaagaaagtaaaagtaaaacgtgcgaaaagcatacagacaacaagcgatagttatttgcgcaaataataataaggagtagtcgaaaagcctttaagtgagtagaaagcatttaatacgttactatcatgaaagaaaaacattttttaaacctatcaagtgaaatacctaaactctcaaagaatgaagcagatcaattaaaaggaggatttaaaaaagtagccacaaaaccgtctgttcaaatgagcggagacattaataaaaactgtcatggaaacagtggggatgcaggtagtgatgaagacggagatgctaatgtcaattgcaaattttcatgtaaatgcaattcatagtgatgaaaatttagttccattaagactaaatttacaatactagtacaagtaataacaaaacaatacattatcatgaaatggagcttatataattttataattagaaatggttctgattatttattgtataatagtttaactaatgagttgatggcttgcgtaggaggcatcaactcattattaaacgagtacaaaaataatatggatgggcttaagcaaatacattctgaattatataattatctggatgcgcaaaagttcattgtatcggacgaaactgatgaagcaaaacaattcatagaacatcaaaaagcgactgatacttcgaatgattcgttacggatcattattaatccaacattggattgcaatttaagatgttggtactgctatgaaaaacatagagaaggtagcactattcacaatgatgtagacttagccataaaaacgttcataaaaaaggaaatagaggataagagtttaaaatcactcagtttatctttcttcggtggagaacctttaatgcattttaggaaacaagttcttcctcttattttatacacaaaagaactttgtataactcataaagtaaaattaaaatgtagcttcaccactaatgctgtattactcactcccaatgtaaccgaactcttagctaatacaaagttagaatatcatttccaagtgccttttgatggagatagggactttcacgattcaattaaaaagcatcccaatggaaccggaacttatgatacagttctacaaaatgtaaaatatgcagcaagcaaaggatttgcttttactattagatgtaactatacagacaagaatatattatctttcaaaaaagctatagatgatttatcaaatatagattcaaaagagaatttagtattctcattacaaagaatatggcaagaggaggattcatcagagctggacaataaagaaaaggaaatgttattatacctcagaaataaaggacttacaaaaccaactgaatataagggaatatttcaatgctatgctgataaagagaattgcattgtcatcaactataatggtgacatttataaatgtactgcaaatgattttctaccggaaaagaaagaaggcatacttaattctaatggggttatcacctacaactcgttatatgaaaaaagaatgaaagctaagtatgcgcttaagccgtgtttggaatgcaatattttacccatatgcatgatttgtacccaaaaacgtctaaagatgataaatgaagaaaaatgcatctatattaaagagaaagacaagcctgatatcatacgcgaccatattcgacggatttataaagaaacagatataacttaatcatcatgtttcctttttacaagcagcacgacagcatgcagtgcggcatcacctgcctgcaaatgatatgcaaatactacggaaaagagtattccttggaatctctttcccgttactgttttgccaccaccgaaggcgtatccatgctgggcatcagcgaagcggcaaacaagctggggctgcataccatttgcggacgggtaaccatggagcaactgccccaagcccccctgccctgcattctgcattggagccagaaccattttgtcatcctctacaaaataaagaataacaagaaattctatattgccgatccgggaaaggggcttgtgacctataccgaaaaggaattcaaaaaccactggatcagcacacagtctaaaggggaagaaaaaggaatagccatgtttatccagcccacacccgctttccatgaactttcgggagaaacaacgaacagaaagcgctccttcaacttcttgtttggctacataaagcaatatcgccgatatttcggacaaatcatattaggagctttagtgggctgtgtgctacaacttattttcccttttcttacacaagccatcgtagatataggtattacccatcagaatttgggaatcatttacctgatcctgctgggacaactcatactgaccataagccgcaccagtgtggattttatccgccgatggatattgctccatatcagcatgcgcatcaatatctccctggtatccgacttcttcatcaaactgctgaaacttcccatgtctttcttcgacaccaaactgatgggcgacctgatgcaacgaatgaacgaccataaccgggtagagaaattccttaccacacaaatgctgaacgtcaccttttccctgctcagtttcatcgtgtttggctgtgtattgctcggctacaacatttttatattcctgatctttctcacaggaagcatactgtatggtatatggatcgctatatttttgaaaaaaaggaaattactggattatgaactgttcgagaaacaggctatgaacaataacaaaacctatcagttcatcacctccatgcaagaaataaaactgcaaaactgcgaacaacggcgccgttgggaatgggaggatgtacaagcagacctgttccaggtcaacatgaaatcattgaaattacagcagactcaggaagcgggaagcatcttcatcaatgaagtaaaaaacatcatcatcaccgtgctggcagcaacagccgtcattcacggacaaatgaccttgggaatgatgctggcagtgcaatacatcatcggacaactcaatgcaccggtggagcaactgatgaacttcctctactcattgcaagatgtgaaaataagtctggaacgcatcaatgaaattcacgaaatggagaacgaggaaaacaacaaggaagcactaaacgcattccacgaccgggacaaaagcctctctttcaaaaacgccgattttaaatacgacccacacaatccgaacaaaacattggacggaatcaacataaccatccccgaaggaaaggtaaccgccatagtggggaccagcggaagcggaaagacaacaatgatcaaactcttgttaggctattaccccctgttggcaggagaaataaccatcggcagtacagacttgcagaaatataacctgaaatggtggcgcaaacattgcggagtggtcatgcaggacggagtcatcttctcggaaagcatcgcccgcaacattgcggtagatgacggcgagattgacaaagaacgtctgcttcaagccgcacgcattgcttgcatcgacaactacatccagactttgccattaaaatataacacactgatagggcaggatggtatcggactgagccagggacagaaacaaagaatcctgatagcgcgtgccgtatacaagaatcctgattatatatttctggacgaggcgaccaatgcactggatgccaataacgaacgggctattgtagagaacctgatggaattttataaagggaaaacggtagttatcgtcgcgcaccggctcagtacggtaaagaacgccgaccaactcatcgtgatagaaagaggcaagataatagaaacaggaacccatacggaattaattgaccgccaaggtgcatattaccatttagttaagaatcaattggaactagggagctaacgattatggataaaaattatgaacaaatagaacttcggagcgagaaagtgagaaacatcatcggacgcataccacctctgcttatacgtagtggaatcactcttattgctttattgataacaggactggcagtggcagcttgcttcattccttttcctgaaaatgtaaaaggcaaagtggaagttgccataaacagccattctgaaatagagataacagctttcatcccatatactgaaatagcgaggataaaagaaggaatgcccgccagtatagaaatggagggatacactaccggaacggatagtcatctgaacggaaaagtgaaaacagtatataaagaggtattgaaaaaagaggggaaaaactacttccggatagatttaaagttggacaacgctgtggattacttcaagatgaaaagcggcatggagggtactgtagccattctattatccgaccacagtctgatggggaacctttttcctgccagcccgttcaagtagactctatttccatctttataaaagaggacagcccccggtatagaggatacaataccgaaattatttccttcaaatccatcatcagtgcattactttctgattataagcaagttattatgaagaatccttctacgatttcttcataataacgtaagcgtctccgcgattctatatagtatattaaaaataaaaagtctaatgatccctttttagtcattagccttttcccatctgtcaggaagcagtagcctgtatttttccagtggtgtattcggttgccattcggcagttctgtttatgacatccgtgagatactcaaacagattcactttattcatcctacaagtaagtgctatcgtgtatagtatggcgccccgttcggctcccttatggctgccgaagaacaatgagttttttcttgataaggatatgtagcggttcatccgttcaactatattgttgtccaggtaagtgtcaccataattaaagatgtccaccacggcattccactcattgcgaagataggtgatagcttccttcagttcgctcttaggcaacaaatctccccgttcttctatatcatcaagcacatcttttatttctccgagtatgtccggcgcatactttttccgatggacaagattctgttctaccgtccatccgtcaaccccgatcttatgcttatgttcattttgataaagtgtgtttatcatctccacgattctttttgcatccgggtcatcctcaccgcaatctataaatttccgttttatatgttgcaggcacggaatgcgtgtgatatggggataagcatcgctttcgagtttccggtaaggtgagtatccgtcgctttgtatgatacctttgcaaccgcctaattcgttaagaataactttttcagagcgggagccgtcatcatagagcaggtatatcatcctggtgtttatgcccacaaccacccagaggtatcccttgcggactccttttcccttgctgttcttttccgggacgagtattttgtaataggtttcgtcggctgccttataaggatcactcaaagctgtctgccggatacacttataaagattttcaaagaggcttgaggctttttccatcaacttatgagccgtaggtttcttcagcgtaaagccatgactttcgaagtagttgatgattctttcaaccggtagcgattgtatataacgcaattccatcagcccggcaatgaatgagccgtcatagctggaattcaagaaagccgagaccggtgtttttccctcaaagagacaaccgtcttgcgcgtaggtgtgtatcttgtagacgtgcttgatgaagcgcatgggtacacattcatagcggacacatattctgggagcggtggtaaccagccgggctttattgatgtcaaaatcaggatcgtcgggataaacgtcatgttcctcctgctccatctcataatgcatgtcacgtttggccccattgttctttctggctttacgcttatctgctttttctgcttctctcttctgccgctcttcctccggcaatgcaggttgagggggttgttgctgttcggatgtgtttgatacaagtttggcgatccccttggtaagacgctgttgcttgccaagagattcgcctttttgaaggagtgcctctttaagggaagaaacctcctttatcaaatcatctatctggtccaggagtctgttgttatcatcccgcaactccttgatttgctccttcaataactctatgacctcatcctttttcatggcgtaaagatacaaaaaatcaatgagtcggccaaaataatcggatggtaatttaaaatcaaacagttaatatacagtatattacattaaatcctaaaacgttttcgcaaccgtacagacttcaatgacactccatttaagataaaagacaaaacctgataagagatctcataattgcctgtatgggggttaaatgtcggcaactcaaaacttccaccttccagacgcttgtagtacaggagaaagccatcaccatcccaacgcagtatttttacactctgccggtttttgccaaagaataaaaatatatctccggaaatgggggacagctccttcatttgagagcgtatgattttgaataaaccgtcaatgccaaggttcatacggacaaagccctggtacagatagtagcgattggctgatgttagagaatacatggatccccctcctttctttcgtaatcgcgtaacattttaataatacccccgggagtggcccgtttgaccgaaatggtcgttccgctgttaaaggtgattgtgatcccggaaagactaaactcttcttccgacaacatgacgggggctatttgagtgaacgaaggagaggaagttgtcggtcgggagggttcaacgccgccataataatcacggaccacatccgccttggcttgtttaacgctataaccccgtctggacatccaggaactcatacctccaagagtggtatgctgatcacggcaaacatcggctaaagaacaattgtagtctactttcaatacttcaaggaaatgtttccaggtttttccaaatcgattttctgctaaatccataatgattcatttttatacatggcaaaaatataagaatgaaaaatgggcgacaagatagaatcgcggagacgcttacataataacttcatattccttcagccccgttccatctccaaaaacgcatcccaaggtgatgactgtccggcaaaacactcacatttcatcaaatgacaacaaccggacgaataaggtgtatcatccggtcgaagtcgttgtatcttcccttcaagtaaattgtttcacttaagtgatgatattatatcaccctagtgatgaactttcatcactagagtgctcaaacttcatcacttaagtgaaacaactgaatcaaaaggaagatatcgtgtaatcaaccggacgaaacagcttgttattcaggatgtttacgcttagtcacttttctctaaaaccccacgaaaaacacttgcaaaacgctattttacacagtatctttgttccaacggaaacctaaaacaacaaataatgaataaaaagttattgaacaaagtaatgaagaagcttgcttcctcgaatgtagtgataagtccgacagtgaagagttcatctacctcattatcaatgcagaagaaaccggaaacggaacaagtacagcaaaaactggaacaatatttgctgagccgctaccacttccgcttcaacctactgacggaacaaacggaatgttgcaaaaaagacgctgacacacctatatataaggtaataagccagcgcaccctgaacagcctgtgcctggaagcacgtgcacgtcacatcaactgctgggacaaggatgtaagccggttcgtgaactcggagcagatgccggactatcatccgttactttcctatatgaacacccttcccgaatgggacggcaaggaccgagtgactccgctggcacaacgcatatctacgaaagatttctgggtgaacagtttccaccgctggatgctgggcgtaactgcccagtggagcggacgcatggaccggtgcgccaacgctgtggcccccatgctggtgagcagcgagcaagggagatgcaaatccactttctgcgaattgctgatgcccgattcgttgaaagactactatacggacagtttcgaactgaccggacaagcaggatgcgagcagaagctggctttcttcggactgattaatctggatgagtacgaccgtctttcaccacagaaactgccattgctgaaaaatctgatgcagatgaaaaaactggatttccgcaagtcgcaccgctcgtcctacagccatctgccccggatggcctcgttcatcggcaccagtaaccggaaagcgctgctcaccgaccccagcggaagccgccgttatttctttgccgaggtaaaggagaagatagactgctcgccactggagcacaaacagcttttcgcccagctgaaagcagaactggacgagggaaagcgttactggttctcggcggcggaggaatccgagctgaaactgcgcaaccaggcctattatgccttgcctaccgaagcggaaatgattctccattgtttcagactgccggagaaaggggaagacttcaaactttactcggcagtatgcttgttcaatatcctgctgaaacgatatccggcagccatgcgcggcatcacgataaacaaaatgggaagaatcatgaattccctgggagcggaacgcatgcataccacaacaggaaatatgtataaactggtagcactggccgggtaaaaacatccctgaagctattatgaaggaatttataatgattccttcataatatccttctgtatatcaacacattacccttccatgaaggatttgaacaattttatcgcttattttaattccgatgtaccaccatcttcttattccggccggtaaacctgcaaaggcagctcacctttcaaggctcccaacgcattataagccagcgagcccatctcgtcttcaccgggcatcagcacgaccggcgccagataatcaatctgttccttgagaatccctacacagtaatcactatgggcaatgcctcccgtcagaataatggcatccacctgcccacggagcgtgacatacatggcccctgcctgtttcgccaccgtatagagcatcgcatccaatacccctttataaggctcctcgccttcggaagctttccgggcaatagtcaccacatcattcatacccagatgggcagtcagcccccctttgccattcagcatcttcttgatctgctttaacgtatacttaccgctgaagcacaattccgccaactggtcggcaggaatggttcccgcacgttcgggagaaaacggcccctcaccgttcaaggcattgttaacatcaatcacccgtcctttgcaatgggcacccaccgatatgccaccccccagatgcaccacaatcagattcaactcttcataatgtttcccgatggaagcggcatatttacgcgataccgccttactgttcaaggcatggaagatggaaatgcgctctatctccggtattcccgtcaggcgggcggccggttgcagctcgtctaccacttcgggatcggcaatgtaggcgggacaatggcattcccgggctatttcatcggcaatcagcgcgcccaaattacaggcgtgctccatccgggcgttgagcaaatcgtgtttcatctgttcgttaatggcatacaccccgccgggcgtaggcttcagcagaccgccacgggcaatgacggcatcaaaatccaacggaatatccgcctcggcaagcaatcgcaatacaaagtccttacggtacgcatactgttcgttgacgtggtgaaactccgacaagtcatccgcagtatgatgggcccctgccgcccacaccggcttttcatcgatgaaaagggctattttggtagaagtagagcccggattaatcacaaatattttcatagtttcaataatttatcaatttgcgaatgagccaaaaccatgcggcaacacagcacagccaattgacacaccggcaaattggcacattgccacattatttatccggccacgcaggccaatgccagactgtaatatttcgaattaccggaatcggcacgcgacggaaccactacgggagaggccgtacctcgcaacatacctgccatgttggcgtcaccaaacaatgacaccgttttatagaatgtatttcccgactcgatattgggaaagatcaacaaatccgcatgtcccaccaccggcgagctgattcctttcacctcaccgctatgcgcatcacatgccgtcttcacatccatgggtccgtccaagtacatgtttccgtaagcaccggcggcggcacgttcctttaaagtcacataatccagtgtatgagggaatttctcgtttactttttccgtacaatgaatcaaggccacacggggagcttctattcccatgcggcggcatacctccagatcataccgcagcatcgcctcgaattgttccaaggtaggacggggaatgaccgccgcatccgagaagaacagcaatttcttgtacatcgggatctgtgccaccgtgatatggctcagcacattccctttcggcaggataccatgttccttattaagcacggcccgcaataaattatccgtattgataatccctttcatcaacacgtccgcatgtccctcacgtatcagcgaaacagcttcctgggctgctttatcgggacttgtcgcctcgtatactttcacatgatccggatattgaaggcggatatattccgagttcagcaaatggggcgtatccgccaccaataagaaatcggcaaagccttcgtgcaaactgcgggttataacgtattcggtatgagggtcattggggcaaacaaccaccacacgtttccgctccttcaacgaacgcaaacggcatatcaagccggcgaagtcttgtataggttccatggtcattagatttttagcaaatatgaaaaataaatctgaatttatccctatctttgcttagtttctatgaataatttaacttatgaaaacgtttcaaacatttgacatttcagccgagtacgatgccatacaccgcacctttccctgccacaaagatgctccagtcatagggcttaccggaaacttccaggaaggcgcatgtactttgctggaaggatatttcacttccattctgaaagcaggaggtattcctttcattattcctcctgttgacgaaactaacagtttgataaactcactgaatgcattggatggcttgctactgaccggcggtgcggatatcaatcccttgttccttggagaagaaccgataaaggaattacacagcataaatccccggagggatcgtcaggagttattgcttgccaaactggccgccgaccggcagataccgattctgggaatatgccgcggcatacaggtgatgaacgccgcttttggaggcagcctgtatcaggatatccacgtacagatggaaggggaacggatcaaacacgatcaggatttgggacggggatatgcctcgcatacggtccggatagagaaagattccttactctataaattgtttgaaacagaaatattgccggtcaattcgtttcaccatcaggcggtaaaggaggttgcgccgggtttcagggtaactgcccgctcatccgacggagtcattgaagcgatggaatctaccgaatgcaagtccatgatgggagtgcaatggcatccggaatgtttcattctggaaaacaatacctgtatgatgccggtattccactggcttatacaggaatccacttctttcagagaagccaaaaaacttcacagccgcatgataacgctggattcacattgcgacactcccatgttcttcgatcaaggaataaacttcgccacccgtgacaagaaaatcctggtagacctgcataagatgacggaaggacatctggacgcgaccatcatggtggcttacctgaagcaattggaacgtaccgatgaagccttatcggccgctactgccaaaacagaccgcatcctgaacgaaatagaggagatggttgccaagaactgtacagccgtagatatagcatatactcccgctgatctgtgccgtttgaaaaaagcagggaaaaaggctgtcatgctgggcattgaaaacggatatgccattggcaaggatatcacgaatgtagaacgtttccgccatcgtggcgtggtgtacatgacactttgccacaacggaaataatgatatctgcggctctgcccgttataatgaggaaggactgggcgtaagcacattcggtgaacaggtgataaaagaaatgaaccgtgtgggaatgatggtagatgtttctcatgccggagagaaaagtttctatgatgcactggcaatcagcggcaaaccgatcgtagcctctcattcttcggcccgtgccctttgcgaccatccgcgcaatctgacggatgaccagttgaaagcattggcagccaaggggggggtggcacaggtatgtatgtatggcggattcctgcgcaagaacggagaagctaccatcaaggatgccatcgagcatctgaaccacatggtaaatgtcatgggcatagaacatgtagggataggaaccgattttgacggtgacggcggcatcacaggctgcgcttcggcatcagaattgataaactttacacgccggctgctgttggaaagatacagtgaagaaaatatccgcctcatttggggtggaaacttcctgcgcgttatggaagaagtacaaagaaaataacgtaactttgcggcgcagcccccttccatataaaggataatgcacaaataaataacagaagaataagtatgaagataagaaatgttttagtaatcccgttcttactgcttgtattgacagccgtttcgtgcggaaacagtaaaagcagaaacgaccggacagaaaccgtagacaaagaagtgatcaaggctcccgagttcgatgcagacagcgcctaccagtacattcaggtacaagcagacttcggtccccgtgttcccaacacacaggcgcacaaagaatgtggggaatatctggcaggacaattggaaaaattcggcgccaaggtatacaatcaatatgccgatctgatagcatacgacggtacgatactgaaatcacgcaacattatcggtgcttacaagcccgaaagtaaaaaacgtatcctgctttgcgcccattgggacagccgcccgtatgccgacaatgatcccgacccgaagaatcaccatactcctatactgggagtgaatgatggtgccagcggtgtgggagtgctgctggaaatcgcccgtcagatacagaaggaacaacctgccctaggtatagatatcgtatttttcgattcggaggattatggaattcccgaattttatgacggcaagtacaaacaggacacttggtgtcttggatcacaatactgggcacgtaccccacatgttcagaactataatgcacgctatggaatcttgctggatatggtaggaggaaaagatgccacgttctattatgaaggttactcggcccgcaccgcccgttccgaaatgaagaaaatctggaaaaaggcacatgagctgggatatggcaaatattttgtaaaagaagacggcggtgagacggtggacgaccatatctatgtcaacaagttggcgcgtatcccgtgtgtggacatcattaactatgatgccgacaatccgcaaagttctttcggctctttctggcatacggtaaacgatacgatggaaaacattgaccgtaacacgctgaaagcggtaggacaaacagtgatggatgtgatttataatgagaaataaatgataaaataatgaaaacaataaacgaacttcagaacgaagtgatagaagagttcagtgattttgatgactggatggacaagtatcaattgctcatagatttgggtaacgagcaggaaccactcgcccccgaatataaaacagaacaaaacctgatagacggttgccagagccgcgtatggctgcaagccgatatggaagacggcaaagtggtgttccaggcggaaagtgacgccttgattgtaaaaggtatcattgccctgcttatcaaagtagtcagcggacatactccggatgaaatattaagcagtgatttatactttatagagaagataggtttgaaggaacatctgtcgcccacccgcagcaatggcttgctggcaatggtaaaacagatgcgtatgtatgcgctggctttcaaggcaaaaatggcgaactagtgattagtggttagtgattactaaccactaaaaaatcatcgtcccagccgcttggtatcgacatcggtacgtttcttctctttgtatccgccgaatttatagaggaatgaaaatgtaaagctacgattgtcccaattcatttctgtccggttccgttgctgcccccacgccagccgggtggtcatattcgatgtattaagaatatcatttcctttcaatatcaccttcgtctttccatccggagaagcccactgaagtgaagtcgaaacattacaaataggacttaagttatacaccccttgtatggcacgtgattggtaaaaaccagccaacgtacctatgatattcggtttcttcgataagatgaatgtgtttgtggtattcagaatgacgctgaatttatgccggttgaatgcaatatcatggaaatggctgttcttgtcatgagagaacaggccgaaagcaaaaatgcgcccgttccaccatgtactcactttataagaagccatagtctgtatggtccatcttttctgaaaatcataattcacaaactgattcacctccgccagacggtcgggcaattgataagggagctgcacaaagtaatcgggtgtgtaattgtaattcacccctatcatatatctattcttatacagataattcaagtcgagcgaataattggaacttggcttcaggtcgggatttccatgagcctcggtatagctgtccacatactgtataataggttgcaactgccagtaagcgggatatttacgattactggtgaaagacatttgcaaggtatggccatctgccggagtataagttgtgtttacagtgggatacagcatccagctatgacgttccccggcatgataaagctctgcggccaaggaaacttcggcagagaacttcttcccaaaactatgtgaagcgccggtgtacatattcagagtatattcttttcgaagcagtttctcggaattatcgggaatcaaggctcctgtttcaccatcccgatagaactggtagctgttatcgtgtgtggcagtgtactttacaccataatttatctcggttccaccttgcaaggaatgaagctggttggcatagaataaccagcggttgatacgttggttgctgtcataattcaatgtccggctgacatcctgcatatctttctccagaaaggtctgtgacggattggagaaaaaaaggaaatccattcctgccgaaaggccgaaagaagattgataatcggccgccacattatgtaactggcggtcaccgtcatccgttttatcactgtgggctgttccacgcatttttgtacagtcctgcccatagcggtattgtgtattgtaaaccacactcaacaagttcttcttcccgaaatcataatccgcccccaagcggaggttatgccggccgccataccctttagcctctgttttcaaatccaactcgtgtacgtcccccgccatagtgtgccatgactgtttgtccaatccgaaagtggtatgtttgaacccgtatgaatacatcacatccgccgaaaagcgccgggaagtgtagagcaaatttccacggcctgcaatgtcttccctgcgggactgttcatacatagccgccacttcaccggaccaagaaggcttctgcccgatattcgattttagaacaacattcaccatggctccacgaatgcggtaacgtgccggagcagcatacatgatttccgctttctccagacgactgacaggggtattctgaagcacggacttcaaatcgtccttgtccagtgtacttacttttccatttactaccaaagtaatactgcgcccccccaaagtgagattgccatcttgttccacgatgccgggcagttcctttaccgcctcgtaggcgttattcaccggaagccgctctaccatacggggtaagtcatagaccagctttccccgctcggcctttaccaccggacgctcccctttgaccaacacctccggcaattgttggaaaaggctgtccatataggtataattcacatcattctgcgcttgtgccgcaaatgccgacaagcataaacaaaagataatcactatcctcatcatcgttttatttttagtgtccatgcaaagtaaaggtgaaaaatgtgccgtatgtgttaccgccggcttatgaagtcttatttagtgttatcaaaagaaagagaatacttattttgtacctatttttgccaaaccatgaagataccgtttaaagccatagccgcattgattatcctttcgctgataggcgtctttgcctatcaggcatattggttgacaggattatacacctcgatgaagaaggatatggacaattgcctgatagaaacattacaggtgagtgactacaatgaaatgatggaacggtgcgactccgtgaaacgaagcaacgaaaccataaatggctatatcgaatccagtatcaatctggacagcagtgctttgattaccaaagttatagaaaccgagcctttcaaacagcaaaaaagatttggtctggaaatcaatgaaccggtatctactaccatcgacaaaaacggtacactggaactgctcaccaaatacttccaacggggtatccacagccagttggaccttttcacggaaatcaacctgcacactttcgacagcctttttacaaggacacttgccatgcgcggaatcatctacctgcctcaccgcatcgaaatagtgaatttacgtcaagacagcacggtcgtacaaggactcagctcacctcaaaaatacaggccgggcaaagaagcagtgagctactattacaattatgacttgtacaacaaaatggcataccggttatgggtggaaccgacaaataccatcgtcttgcaacaaatgaaggggatactttatacctctttctttatcattattatattgggggtatcattctggtttcttatccgtatcatcttaaggcagaaaagtgtagaagaaatgaaagaggatttcacacataacattactcacgaactgaaaactccgatagccgtagcctacgccgccaacgatgcattactgaacttcaacggagcagaaaacctgacgaaacgacagaactatcttcagattatccaaacccagctgaaacagctcagcggactggtggaacagatcctttccatgagtatggagcaacggaagaacttccgtctgaactatgaacctgtcgaactgaggcctatgttggaaaatctgatcagccaacatagattgaaagctgataagccgactgagttcaaactcattatggaagaaaacataaccctacgtgcagaccgcttgcacctgtataacatgatcagcaatctgatagacaatgctataaaatattccgatgaaaaggcatatatttacatttctgcaatacgctgcaacaatccatgcaacggtgaccgtaacgcttatgtgatgctaaagatacaagacaaaggaataggtattcctgccgacagacaaaaacatctgtttgataagttttatcgggttccgaccggtaatctgcataatgtaaaaggatatggattaggactttattatgtaagaacaatgatagaacagcataaaggaactgtttccgtggaaagcagcacaggaaaaggcagtacctttacacttaaaattcccgaataagcaaatggaaaagatacacgttttattagtagaggatgaacagactcttgccatgattatcaaggacacactggaagaacaggattttatcattactaccgccggagatggtgaagaaggcttaagaaagtttttcgaacagaaaccggacgtattggtagccgatgtcatgatgccccgtatggatggctttgaaatggtacgccgcatccgccaatcggataaagcaaccccggtattattcctcaccgcccggtctgccatcaatgatgtagtaaaaggatttgaactgggagctaatgactatctgaaaaaaccattcggtatgcaggagcttattgtacgcctcaaagccttgatgcacaaagcttttgtggaaaaagaaataaccaatacctacaccatcggaggatatcagttcaactccgtcacccaacaactggattttgcagggaacatacaagaactctcccaccgggaatcggaaatcctaaaacgcctgtgtgagaaccggaatgaagtggtgaacagccaaagcatcttgttggagctatggggagatgacagcttcttcaattcacgcagcctgcatgtatttattacgaaattacgccataaactgtccaaagaccaaagcatacggattgtgaatgtaaggggaataggttacaaactgattataaactaacacttcttccctctaatcaagactttctgcccgccggacaaggtagtggcaaagatataatcatctcctccctctttcagtttcaaacgtttgcgaagttccgcaaccgataatggaaagttgcggatcgtaatattcgccttgtccatatccatcaagaacgctttcagttccttttttccaaaacccgatacggcctcaacccggaaacgacgtcccggaaaatccggaaccaaagaaacagaggtatataaatggctgttgaggtgaagtttcgccacaggataggtttgtgtgagagaacgaaaagcaccggctttcagtatagcggcattcggttcatacaaataagttccgacttcatcggccaaaagacagggcgatgttttttcctgcttcaaggtaaaggtgtaatgccggctctccccgttgcctgcaatatgttcgcaatggatgcttacctccgatgaaacggactctttttgcagtatcagcaataactccttgcactcgttattcacagcgacaatgtgtaccgcacgaactgttttcaactcgttcaatgccaatgacagatccagcataggcgataatttcaccatcactttctttgccttatcaaccagcaaaggctccaaaacagtaacatccggctcgcaatcagagatggcaaccgtctttccaccgtgtccgtctcttctggcagggtctaaaaacaagcaatctaccggaagcatttcctgcaaataggataccccgtcccggttgtgtatccgaatgtgccccaaccccaacaaagggaaattatgcaaagccagctcacaaagtcctgactgcctttccacataatcagcctgcttgaaattccgggagataaagctgcaatcaataccgaaacctccggttaaatcggcaaaagtatcgccttccaacaaagaggccttatacaaagcagttgcttcggaagaacattgctccatagacaaatgagggggataccataatgcagaaaccggataccatgaaggtatcttgcgggccgccacctgccgtccggcaatttgtgtgacagctgccgccatgtctacatcgggatatttcttactttgcaaagcaagtgtacgcgtatcgtcctctctgtgttcttcgatgaaatggagtgtttttgttgatatttccatcctttatctaattactttatagttccgttttgcctcttcacgactgcggaagttgaaatgccaccactcactgcgcaaaggtttataacccgcatccgtcatgacccggcgcagcagcaaacggtttttccgttcctgcgctgtaatgattccctgctgtaccattgccgcttcggtatctatgtgtgcttccttgcccaaatgatccaccttggtccccataggcaaaggatttcctttttcatctgcaatactcacatccaccgccaaaccataattatgcaaccctcctccccgggccggattggatacatatatattttgggaagtaccttttaccacattccacattttctgctgcacggacataggacgggcggcatcataaataatcagagaataaccgggatacaactctttcaaccgcttttgcgcttgcaacaaggctttggcagcctcaggatgaagataggcctcctgcaaatcctcataaaggactttcccggtaaaattgtcggcacgggtatacatcaaatctattttcaatgtcgggtccatccggcctacattcaccaatcccaaagaatcaagataatgctccatcctgctttgcgagaaagcgggacagagcattatcagcaatgatataaaaataaaaacagacttcatctacagcggtatctttcttactattataatacagacctcagtaactcaggaatctcaatattacagcattccatctccttcagtattttctttccttccgccgtaagcgagaaatacatctggcgtttgtcacaatctcccaaattacgctctatatagcctttatcctctacagatctgataaccttagaagtattcgaattagaaagccccaattgctctgctatctctcccgaggacaggcgtttctttctggagagacagcacagcaacattccttcgttcagacaaaggtggtgcgccttttcaaaccgtgtttcaaattctgcaatagcgcgatagagatctcttattttacataaagtttccatattgctctttcttcttgatgctattgcacaaaagtacttattttttcaataaaaactcatcaatagcctttttaaatgacgctttgggcatagccccctgtgccatctccggctttccttccatggggatgaacagaatggacggaatactccgtataccaaacgcgcctgccagttcctgttctttctccgtgtccactttataaatcacaatctggccatcgtattcttttgccaattcgtccaaaataggagctaccattttgcaaggaccacaccagtcagcatagaaatccacaatagccggtttgtcaccttcatatttccactcttccgggtttttctcgaaattatatactttcgccaaaaattcagctttagtcaaatgtatgacctttccatttccttctgttgccatagtttcttcttttacagggttattattactgcttcctctgccgcaagctgttgtggcagccagcacaagggctaaaaaaaataaaatcgttttattcatacttattcctccttctttatctttttatgctccggcataaatgaactgagcaacaatccccccattgccgccccccaaatggaactgttgacaggagaagaagtgatagggcaagtcccagtggtgcaacctacataccgccaatacaaatatcctcctaccattcctgccacaataccaagcaatgtccatccatacctttttataaactcttttttcatactcttcttcataattaaaaccggactctgttatgttatctcctttaattatttcctcaggaaactttttccaaatatattccatactttcctatataacaaatttccttaggaaaatatttaaataataactttccttcacgattcggcacctacatttacacaatattcagcaacacaaaaggtcaaatcattatacaacaactatttcccggcccaagacagcaccacaggactctctacacgcactccgtattcagccgctttttccagtatattcctcgccaactcaggcttctgatcatcactagcataacggaaataggcttccgccgcccgcacatgtgccgcatcgggcatcgggaaagcacgctcttcaggaattccgaaatcagaactgctcagttctctacgctcttcggcatccaaccggtctgattctactggtttcataaactataaggttttaaagtgaataatcttcataagaaaacagaatgaatggaataaagatggcaggaaagtgttaatctatcacatttttcacggattacttaaaataagaaaactattaatgctgttatttccaatgatttattatttttgtacccacctagataaacacaatgaccatgaaaaacaaactatattttattatagtagccacgctgctgtgtccaacatcgctatatgcacaatccggcactgacaaacgatccgttctgtcctttcagacaggtcctaccctctacaccggaaagctgataggaatagcaggatattcctcgaatttgcgcaacggcataggttggtcaggaagttatacttacctggtaggaaacaagcctgccattagagccggattcggaatactttatcaaggcagccggtatacaggcaacacgacaaataccacagacaagattcaaacacactattttgctccacagttctccctgcattggctgaaacaacaattcgattggtattttactaccggaaccggataccagttatataaagacgacagtatggtatatgataaaccacgaaaagtatccatgaacaaatgggcggcaaactttggagtaggcggagaataccaccttttcacccattgggggatcagtgcaaggataagctatatcctggcgtattccggtgaatattccgtccgctatcatcataaagaatggatggtacaaccacattatccgatgaacggttcggatgacatttctcaattatctttctcggcaggtattaactatcacttttaaaagattcggaccatgattaaatatcttagtacaatagtattaactgtcgcgttatgctgtgcctgcgatggagaagacttttcagcagatcctactctcatgccgcctgccactcagacaggcgccaatacctttggctgtctgatagacggctgggtatatacaggacaacgctatgggccggaccataaagcatcctactatcctgcttataatgaagatgaaaaagcaacagtccatgtatacgtttgggtagataccaatacgtctatttctttcaatatcattgacccgaaagaaaaaaatatcaccgtttacagtgatattgaaaagatggataatgatcagaccatctataccgacgccgttttcaaagatggaaacaagcaagaagaaagactggaagacggcattgtcaatattacccgctttgatttgaacaacagaataatcagcggaacttttgaaggaggaagagtgacagaagggcgttttgatttaacattctaacatatacccgttgacaaattagacccagcttgccaacgggtaaattaatctctttcttattttatcctatcatactgatcgttcgcactaatctccgtgtatttaggcgcatcaatcatttccaccaaagcgcgtaacacaggcccttcacccatcggatcatttttctgagtgggacgattataataaaatacggtggaaggcataatacctgtaccgacacaaatagccgtcacatcaccattctctgaaatttttgacaatattcctttgaatccctgccatgctacataaatgaaatccggatgcaaccatccttccttcacacctttagctatgccaaatacaaacatagaactaccggtaatttcttcataagaatcttctttatccaacaactgatgccacaaaccgtttttcccttgataccgcgctactccactagcctgcatctggaaattctttatcacatcctcacgcatgggatgattttccggcattcttgccaacagatcagctgtcgccataaaaatccatccattggcccgggaccaatgcgccactccatgttccttattatccgtatgatagcaatgataataaatctgtttttcaggacaccacaaatatcgtgtataattcaatatctgattggcagcatcatcaaaatacttcttttcaccagtaacctctcccatgcgggaaataaaagacaccgccataaacgcatcatctgcccaaattgtattttcatgaggccataaacgggctatggttccatcggccaaacgaggttctgaaaccataatatgatgattggttgtttcaatatatttttggaaagcatcatccggatgacgctggttcaaagttatcaaactagcccccataggaccgttgtcatccaaacgcttgtttctataaatcatatgccaagtaagacggggaaccgctctccatcctccttcacggaaagtcttatcatacaaacgatgaaaataggactggttagtcttatcaaaaatgaacttcatattcttcagcacataatcctcatatttccggttctgtattttatcacccaactccatcaaagccatatttgttactccgtttgtgtaatgccaattcaaatatttactattgacacgcatatccgggtttaaagaaacattatccaaagaagtgtatactttacctgtttttacatccttgaattcataaaccgtagaagcaacaatacgatcggctatctttatagccatctctttagccacagcattgtcctgtgccaataaaggaaataatcccattgcaaacaataaaatgcctgcacaaccataacgtttaaccatacaacctaaatttaattttttatttttatactaacaacctctatattccaccgaaataaaaagtccggctatctttaatattcttcaaagataaagccatcttcccgtttcgtacaaattttcatcctactttttaagggtaatatccacattttcagttttagagtatataatgtgctcatgattttatactaagagaaagaaattctgttcatgattcctgtaacaagagtaacaaatgtaaatctaactcattatcaacacgctaattatttctgtgtaagttctgagatcaacactgaatttattatgtaaatttactaaaatgtttgcatgaaaggtttagctccacacacgctgcaagtttttgaagctgtttctaagttggactgcatcaaatcctatctcttggtaggtggcactgccttgtcattgcaaatgggaactcggcaaagtgaagacttggactttatgaaatggcgtacctctaaaacagagaaaatggaagtggcatggtatcagatagagaaacaatagtgaaacaacagctatatattaggagtaaatcaaccaagagcaacagatttatatctggaggatctgcaaacaaaaaaggctgtattccgttaggaatcagccttttagtttgtggaccagcctgggcttgaaccagggacctccagattatgagtctgttgctctaaccaactgagctacaagtccgtgccacaatttcctgttagcaggtgcaaaagtagtatattcccttgaaacttgcaagatttatcgcccaaattttgataaaaagatttaattcccttattcgtaaggatataaattgtatttttgtgcaccattaattaattttgctaagccgtatggcacaaaaaaaacaggaaacagccctaacagggctttcggacaaagaagtccttatcagtagagagaagtatgggaataacctcttgacacctcccaaacgtccttccatgtggaaactttatctggaaaagttccgcgacccggttatacgtattcttttagtcgcagcattcttttccttagtgattgccattattgaaaatgagtatgcggaaacaatcggcattttctttgctatttttctggcaaccggtatcggattctactttgaatacgatgcgaataagaagtttgacttactgaacgctgtaggcgaagaaacaccagttacagtaatcagaaatgggaaagtacgggaaattccccgtaaggagattgtagtaggtgatatcgtagttctgaataccggtgaggagattcctgccgacggaatcttgctggaagctatttccctgcaagtgaatgaatccaacttgacaggagaattaatggtcaataaaaccatccatgaagaactatttgatgaagaagccacttatcccagcaatgaagtgatgcgtggcaccacagtggttgacggacatggaataatgaaagtagaacgtgtgggtgattccaccgaaataggtaaggtagcacgtcaggccaccgaacaaagtgaagaagagactccattgaatatccaattgacaaaattggcgggtttcatcggaaaaataggttttactattgccacacttacctttatcgttttcacagctaaagacctttactcctacctcagcgtaaatgaaataacagactggcatgggtggatggcaatagcccgcattgtattgaaatatttcatgatggctgtcactttaattgtagtagccgttcctgaaggcttaccgatgagtgtcaccttaagtcttgcactaaatatgcgccgtatgctgaaaaccaataatctggtacgtaaaatgcatgcttgtgaaacaatgggggccattactgtgatctgcaccgacaaaacaggtacattgacacaaaacctgatgcaggtacatgaagcgaaacttgatgccaccaaagcagatttaatagctgaagggatcagtgccaactccacagctttccttgaagaaacaggagaaaacaagaaaccatccggagtaggtaatcctactgaaatagccttattgctttggctgaatgaacagggcaagaactatttggaattacgtgaaaatgcaaaagttatcaatcaacttactttctctacagaacgtaagtatatggctacattagtagattcacctatccagcagaaaaaggtactctatataaaaggagctcccgaaattgtaatgagaaaatgcaacctctcttccgaggaacaggctcattacaatgccgatctgctggcctatcagaacaaggcaatgcgtactttaggattagcttataaatttatccctgaagactccggtaacgattgtgccgaactagtcaatgaagggaatatgattttcctaggtatcgtagctatcagcgaccctattcgtccggatgtaccggaagccgtacagaaatgtcagtcggcaggtatcggtgtgaaaattgttacaggcgacactccgggaacagctaccgaaattgcccgccaaatagggctatggaaacctgaagatacagaccggaaccgcataacaggggtagaatttgctgcattaagcgatgaagaagctctggaccgcgtacttgacttgaaagtaatgagtcgtgcgcgtcctatggacaagcaacgtctggtccaactgttacagcaaaaaggagccgtagtagcagtaaccggagacggaacaaacgatgctcctgcactgaatcacgctcaagtaggtctttctatgggaaccggtacgtcagtagccaaggaagcaagtgacataaccctattggatgactcgttccacagtatcgctaccgcagtaatgtggggacgctctctttacaaaaacattcagcgtttcatcgtattccagctgactatcaacgtagtcgcattagccagtgttttattaggggctttctttggtacagaactaccactaaccgtaacacaaatgctttgggtaaatcttattatggacacttttgccgccatggccttagcatctattccccccagtgcagacgtcatgaatgaaaagccacgcaagaccgatgatttcatcatcactaaagccatgcgtaaaaatatactaggtgtaggcttctgcttccttgccatactgatgacattaattgtcattatcaaacagatgccagcagatttagtaggacaagctttgacgcaattcttcacgatcttcgtgatgctgcaattctggaatctatttaatgccagtgttttcgggaccaaccattctgtattcaaggattcccgtcatgcattaggcatgctaagtgtggctatcattattttagtcggacaaattctgattgtcgagttcggaggtaaagtgttccgtaccgaacctatgaatttcatgacttgggtttatattatcgcaggaacgtcattcgtattgtggattggtgaaatctaccgttggataaaacgaatacagaaaaaagactaaaaaagagaataaagcacataaagagttatggacagtaagattaaaaatgtcgtttttgatttaggaggagtattaataaatctggattttgacaattgcctgaatgcttttcgtaaagcaggatttcaagatatagagaaacaggcatgccagttcaggggaaaaggtttcttttcccaatttgaattgggtgaaatcagcccggaagaattccggaaagccattcgtaaggaggtcagcgaagccctgtccgaccatgaaattgatgatatgtggaacctgatgctacttgatattcctcgtgaaaaactggacttattgctaaagttacgcgaacattatatggtttacctgcttagtaataccaaccggatacattgggattatgcctgtgagcaaatgttctgttatcggggattccgtgtaaatgacttttttgaagatatttttctgtcttttgaaatgcacaaggccaaaccggaaaaagacatttatgagcaaatgatgaaagaagcaaacatcttgcccgaagaaacgttttttatagatgactcggcaatcaattgccaggcagcaatatcgcttggcatacagtcctatcattaccatattggagaagatttaagttcactttttgaataatgaaaataatatcagatataaaccatcaaacattgcctccttcagttgccactatcggcttcttcgatggagtgcatcgcggacaccgctttcttattaatcaagtaaaagaggtcgctgccaaggatgggttatattctgcattgatcacttttcctgtacatcccagacaagtgatacaaaccgcttatcgtccgcaattactttcttcaccaacagagaaactcgaattattggaaacgatgcaagtagattactgctttcttctcccttttacacaggaactttcactgttttcggctcgagagtttatgcagttgctacgtaacaagttcaatatccatacattagttataggctacgaccatcgtttcggtcacaaccgcagtgaaaattttgaagattattgccgttatggtgaggaactgaacatatatatagtacgcgcgcgagcttacacagacaaagagggaaaaatcagctcttcagtcatccgccaactattaaaagaaggtaaagtaagtcaggctgccaaattcctggggtataactactatctggatggaacagtggtagatggctacaaagtaggcagaaaaataggattccctacagctaacctgcaagtggattgtagcgacaagttaattccctcggaaggagtttatgcagtatatgtatatgtggaaggaaaaaaatgggcaggaatgttgaacataggacaccgccctactatcaataacggcaacaatttaagtattgaagtgaacatcctcaatttttcggagaatatctaccacaaagaaatgcgcattgagttcgtaaagtatcttcgccctgaagaaaaatatgacactatagatgcacttattgcccaaatgcataaagaccgggaaaaaacggccaaaattcttctctaaatacaagggagcattgtacagccttccccttttcaaactactctttctacacatcttcgtttacagtcagttttgcctgctcgaaaacagttcattctatgtaattcgggcagacaaaatcacccctgccagtgaacgcaaacgctatcggaagaattaactcaccgataccagtcacttcttgcataaaatctgtttcttcatacacttccatcctacaaagcacgaaaaaagatatatttttatcgtttttcgatatttttttttcgtttttcttttgtagtatcaaaataagatatacatttgcatatcgataaacgataaatgaatatcgagaaacaagaaagaataaacacaaacattaaaacacgaagtaaaaatgaaaaagtcagtattaaaatcagttttagcagcaattgcagtagtaatgatgagttgtacaacaacagcaaacgcacaaacaggaaacacaaagtacatctacggtcagaatgacacaaacacaaccgtgtacacactgaatgaagacggcaaaacattgacacgcaaactgaagtatgagtacaaacacgatgaaaatggtcaggtaattgagaaaaaagcttatcgctgggatgcttaccgggaactgtggaagccggcctatctgcttaccgtaactcccggagtctatgaaatcaaactcaactacgctgaatggaacgccaaagagagcactttcaaccataacaaacaagaaagtatttaccgtgaaggcaacaacgcaaacttgttggccgacacacaaaacaaaaagtaatggaaactttgaatgaaacacaaacccaaaataagaatgcgaccagcctgtggcaaaccataggaatgtacataggaatgatggtcggatttttatatccgcaaataggattaggcttgggtatgcttttgggaatagctttgggaagactggtcctgaccaagattcctgtcaacaccccactggcccaaagagcacaacaaaaaagtgcaattatccttattttagcatttcttatcctattcatgaaccattggtacgttccatgcaaacatgccattgctcacttgatgaactaaaaacaaatcaaccaaatttaaaagacaaccagatgaaaacaaccatgattttgatcgcaccaaggagaaacccaaggatgcttacttaaagaaacagataccctcaggacggatgcggaagtccgtcctaccccttaattcaaatccattttaaaccaataaacattctattatgggacgcgcaattaaattagtactttattacttcgcttatcagttagctttcaccttcctggtaggacttccggcgggaattattaaagtgatgaacgaaatttcagaaaatgataatctggcttatgccgtaggtaagaatacagcctctatgacaggactcgttatggtactggcaggaatagccatgatctggcacctgatctactttaaatacgttcaattcaacaagacaagctggactgaagtacctgcaaaaaccattttattgagtattcccttcattatagcagccatgttcatctgcaatgtagccagcgaattcatagaactgcccaacctagtggaagacacattcataggaatgagccgcaatgtattcggcatcatcgccattgccgtcatggcacctctggtagaagagttgctgttccgtggagtcattgaagggcatttcctgcaaaccggaaaaagacccggtatggcaatcctcctgtcagcactcattttcggtctcatccatgtcaatccggcgcaagtacctttcgccttctgtctgggattggtattcggatggctttattaccgcacaggaagcattataccgggaatgatagggcattttctaaataactccctggctaccattgccatggctacatcaacccaagaagagttgaatgaaaaaacggttgatatgattggcgccacacctacttacatccttttggcagccgccataatcatcctagtcggcatgtatttctatctgaacaaacatttgccacagccgggaacaccctctgaaattactaacacacaagcataaatgtaacaatgaaaacaaaactcaacctcttttgcgtctgcgtacttatcgccttgctcctttccacctcaacgacagtgagcatcatgttccattctttcacaagtgcctttaaagccggatacgaaagtgtagaaaaaggaaaggatatccacatttccgattataagatgatttgcacccttcctaccgatctacttgaaaagacaggaagtgtaaccaatgtcaggacaggagaacaggcatctatcataccgattataagcatggtagaggcgccaacgaaagaaaatgataccttccatgcactaaacaggattgcctcattcatttcggtgatagcgggaattttctgcctgttgcagttcttttatttgatcagaaatatcaatcgcggtgatatcttcagctggaagaatgtgaagtttctgcgcaagttaggatgggcattgatacttttgtttatctgcacgctggctaccatcgtgattggaaattatgaagcttcgcaagtgttgcaactcaacggatgcgagttctcctatacctttgctttttccgatgcgactctcattctgggattcatttcattgctggtagccgaagtatttgccatcggactgaagatgaaagaagaacaagatttaaccatttaaaaaaacagagcagactatgaacaagttcagaatattaggtgtcatagccattatagccatcattgcaaacttctttggaggattggatgaaaattggagagatttcaagaaaggatttgaagatggacataacagtgcaatggaaatatatgagcctggacgccacattataccccatcatgcaacctcagtcaagctgaatgtagagccgttacctgaaactactgtcgattcactgagcaacaaccgcgtggactggacactcccctacacagtgactgaaatagaaacgtatgccaagccatcggcctggcacatccttgtcatgggacttgccatacccggaatattcctttttctcatcggtttctgctcattgatccggttgctcatttccatctcacgccgcgaagtatttacatctgccaatgtacggcgcctccgttggtttgcatacaccagtgcaagcttggaaatcctcatagctgttgacgaatggattgtaggaaacgcagcagttgagcaaatcagtctgccgggctacaaaatcatcagctacgccggttattctcccgactgggtagctgtgataattcccattctttttgccgagatatttgctatcggggcaaaaatgaaagaagaacaggatttaaccatttaagaaaaatgccatgaaagaaaaaaatactttcccctcaaaaagaaaaagcatcttttatttgatactttgcctgatagctactctgtttgtaagttcattcatctatttccttgtgttacatccattgttggacaacaaaatagtgaggatatcgatcaacattggatggacttgcttctgtctgtatgcctttaagaaactgacgcaacgccacaccctttggtggcgcgcagtagatgagaacccgaataaacccaaaatgaattgatctatgccaattatagtaaatttagacgtaatgatggcgaaacgaaaaatttcgctgggagatttagccgagaagatagacctgactcctgctaacctttccatattgaaaaccgggaaagcgaaagccatccgtttctctacccttgaggctatttgcagggaactaaattgccagcccggagatattttagaatatagagaagaaggtgaataatataaacagccacatatacaaacactctgataccataaaattctcatatctttaatccggatactctgaccgataaagcatttcaattgccataccggcagagtattttcaccttatacctaaaattttcttatcacttcccgacacgctttagccaatattccctaaaaatacactactgataaaaacaaatattgcataagcaccatataatcccatgattatccgtatctttgcagcgaattagatatttgaaaataaatgaagacatttgaagagttaggcgtttccccggaaatactaaaagcgattaaagaaatgggatatgagaatcccatgccggtacaagaagaagtaataccgtatttattgggaaacggcaacgatgtagtagccctagcacaaacagggactggaaaaacagccgcatttggtctgccgcttatccaaaaagttgacgtaaagcaccgtgcacctcaagcactaattttatgccccacacgcgaattgtgcttgcagattgcaggcgatctgaacgattactccaagtacattgacgggctgaaaatccttcccgtatatggtggttcatccatcgaaagccaaatacgcatgttgaaaacaggcgtacatattattgtggctactcccggacgactgattgatctaatagaaagaaaggttgccaaactagaaacgattacagatgtagtaatggacgaagccgatgaaatgctgaatatgggatttactgatagcataaatgctatccttgaaaaagttcctgaagaccggaataccttgatgttctcggctaccatgagtccggaaatctcacgcatcgccaaaaaatatctgcatgacgcaaaagaaatcactatcggtaccaaaaatgagggcagtaaaaacgtcaatcacatagcctatttagtacacgctaaagacaaatatgccgcattgaaacgtatcgcggattattatccacagatttatggcatcattttctgtcgtacccgtaaagaaactcaggaaattgcagataaattaatacaagacggttataacgcagactctttgcacggtgagctctcacaagcccagcgcgacttagtgatgcaaaaattccgccaacgccatttacagcttttagttgctaccgacgtagcagcccgtggcctagatgtaaatgaccttactcatgtcattaattatggcttgcccgatgatatagaaagctatactcatcgtagtggtcgtacaggacgtgccggaaaaacaggtatttctattgccatcatcaacctgcgcgaaaaaggcaagatgcgtgagatagaacgaatcatcaacaaaaaatttatcatgggtgagatgcccagtggtaaacaaatttgcgagcagcaattgattaaattgatagatgacatagaaaaggtaaaagtaaacgatgaagaaattgaatccttcctacccggaatctatcgtaaactggaatggctttcaaaggaagatctgataaagcgcgtggtgtcaatggaatttaaccgcttcttggaatactatagtaacgctccggaaatagaaattcccagcacaaatgaccgtcgcagcgaacgtggctccaaagaacgcaaggatcatggcagtgctcgtgaaaagacagagcgtaaagcagaaaaaggatacacccgtctattcctgaatgtaggaaagacagacggtttctatgccaaccaaatcatagaactgattaaccgcaacatgaagaagcaacgtactaccatcggacgaatagacctgatgcagaatttctctttcttcgaagtagcagaaaatcaggcacaggacgtgattaaagcattgaacaaggttaatctgaatggcggccggaaaattgtagtagaagttgccggtgacaataatggcaaaaacgacaatggcgaacgcagaagcagtgcagcaaggaatgcttcattcggcaaaaaaagtgacaggtccaataaaaaaacgacctcaaaagaaggaagacccagccgtgcggaacgtggctacattgaagaacgcggtcccaaaacgaaagacgactggaaacaattctttaacagcgataacaataagaaaaagaaatccaagaaatgaggaagccaacttcatgaaagagaattgagcatagtagaaatatgcaaataacatccacttctctcgaataatagcggagcaggcagaattgaaacaacctgtcatttcaaggacattccgcaaataatacgataaatccaactgactcataatgaatcagttggatttatcgtattattcaaaaaaagatttgccgaatatccttgtttacatcgaattaatattaacagtttttttgccatctttccggatgaaagattatatgacaaactatcggaactttgacatacccaagcttcctgtcatttcatatttttcttttagtctgtcaatttcagttcatcgaccaaacgggaagctttcccatatttttcaatcatgtaaagaacatagcggatatccaccccgatacaacgctgcaaattaggttcaaaaacaatatctccactcattgcttcccaattcccgtcaaaagcaagacctattaattccccttttccattaaacattccactaccggaattccctcccgtaatatcattatccgaaataaagcaaacattcatattaccatctccggtagcataacgtccgaaatccttccttctcaagcattcgactacagaaggaagcacatcgaaatcactatctcccttatactgccttatcttgtcaaaaataccttttgtcgtcgtaaagtaagaatattcaatagcatctttcggtgagtaaccacccaccatgccaaaactcagacgcatagtagaattagcatccggataaaacaccctatctgcctccatctcacgcattgcttcattcagcaaacgttcatttttctcaatattcatactagcttcttccaccgactgattgaattcataaaatttcaccaacatatcaatagcaaaagaagccccagggtcatcaaacaagacataagtggtatctcccttcaccacctgttcaaacccatgcggtgtctttaaagaggaacgagcatacaaatcatctacataagcttggtaatcacctttaaaatctttctctatcaatggataaacatcaggtaaaaactccttgcctacctcagccgcatattctttcaacatagccacaaagacttgtttatccacacttatatccatattggcataaatctccaacaattgccgcatattacgctccaaatcactctcctctgcctcaaaatcaaaattcagtacagccaaggctgccgtaatcaactccggtccattagcaaatgtttctccaaaatatgccatagcccgcgccgcatttctacgattacgataattcagctccagttcagtcagaacccttgcatatttgcttcgcttatcaggttcccgacggatccattcttgcaactggcgctccaaagcttgttttttctctatcactttcaactcttttaccgcttgattcatgcctatactattcttccaatagttagagctttgtgcatacttggaagcatatttaatgcggatatcatcacttttttccattgcatttttccagatagcctgcttgatggtacggacattaatcatagcggcattatccgtattaatcctttcgtctatcccaaatgaagacaaatacctgctggtagaaccgggatatcccatagtcatgcaaaatgaaccttgttcatacccgcccaaagaaacaggagcaaaataatccggatgataaggcacattctccggagaataagctgccggttgattattctgatcagcataaatacgaaaaacagagaaatccccggtatggcggggccatacccaattatctgtatccccgccaaacttgcctacagaagagggaggagcaaacaccagacgaacatcataataatctttatacacagacagataaaactcattaccaccataaaaaggagttatctcagcacgcagcaacgtatcattcgccacagcttcctgagcaagcaatgtggaaatagaatccacaatcagcgcacggtcattttcctttgtcccgactggaatagcttgcaacacacgctccgtcacatcctctgtgcgtatcaggaaactgacaaataaatccggattaggaagctccttacttaaggagtcggctacaaaaccatctcgcaaataatcatgctccatagaactatgctgctgaatggcatcatacccacaatggtggttagtaaaaaccaagccatccggagatacaacaacccccgagcaaaaacctccaaaactaacaacagcattagccaatgcttttcctccgggattatacaattgttcagatgaaagttccaatcccatttctttcatcacttgttgagtttgtttgctaaggcaacaaggaagccacattccctcattaccccatatacataaaggcaggaaagacagcagcaatagtagttttttcatggttttattctacaattaatttaagttttttcgccccgacacgtgccttcaaccattcggaaatcttttcctgttcttttcctacaggttttttactgaatttcatcaagactattgtcaatgtgtccgtttgggttgagtctacctgcaattccacagtcttcgccatggctatagcttctgctgcaggataaagtactttaagttcgggaattatctttttatctacggtattgtatgcggcatatacattaagttcgttttccaaagacttaatcttttcctgctgctccagcaaacgtttctcactattcttataaaagtcctccatcacttgcgcctttatactgccaatatccatcgcatcattattcattccttgaagaacaaccagtttggttcctgccagattaaaaagtttcaagttatcccttgcggttgctatttctgtttccgaaacctcattgcctattagcacaacacgtatttccttcttctcgaaagaaatcttccggtctattacttgggtattattaaaattcagctcctcgttgataaagttgttggcagaagcttcataaatagtactttttacaatgccataagtcagataaacagcaggacacatcgtagccaaagtaataaaaataatatatttctttaccaatttctcacgctccttatccacaaactccttacgttggaaatgcatgacacgcaccccgataaaagtagccagactgataaatactgaattgataaaatacaaatagaacgcacctaaaaaataaagtaaatttccggtagcaagcccgaatccggcagtacacaaaggcggcatcaaagccgtagcaatagctacccccggaataacattccccttctcctttgtagacaaggcgataataccggccaagccaccgcataaagctataagcacatcatatatagtaggagaagtacgtgccagcaactccgattgcacttcatccaacggagtcagcgaaaaataaatcgtggatgtaatcacactaaatacagtcgccaccaaataacttttcagagaacgtttcaacagttcaaaatcattctgtccgatagccagccccactcccataatcggccccatcagcggagatatcaacatagcaccgataatcactgccgtagaattcacattcaagcccaatgaagcaataaaaattgcgaatataagaatccacaaattagttcctttgaactcaacaccgttacgaatactttctacaatcaaggcttcattatccttatccttgcgcaaatcaagatattcaccaaagaactgctttatataaggcacattcttcaaatcattcttcaggtcactcatagctatttctttatgtatcggtttataacaggtatctgctgcaaggggaagtccgttttcacaatatatgccacaaacaataacaacagtaatgtacgaacacccaacaacaagaatatattttgaataggaagataaactgaaacaatgtaaagtaccagcgctaacgccacatagttacctatcgctttcaaatcataattaataggatattttttctgccctacaaaataagagagaagcatagctactccatatccggcaaaacctgcccacgcacacgccatatagccaaataccggaataaggaaaatatttatcaggataatgatactgcatcccaccaatgaaaaataagctccccattttgtttcatcaatcagcttataccaaaaagaaagattgaaataaatacccataaacatttcggcagccatgacaataggtacaactttaagccctacccaataatcacgtcctaaaatataacgcaatatatcaaggtaaaacataacagccaaaaaggccagcaaagtgaagataatgaaaaacttcatcgctttggcatacatttcccgactatccttttctttactcttactaaaaacaaacggctcgtatgcaaaccggaaagcctgtgtcagcatggccattatcatagctattttactggcagccccataaatacccaactggatggtcgcctccgccttatcaggataaacaaacggaaaaataattttatcggctacctgatttaagattccggcaatacccagaatcaatatcgggaaagaataatgcagcatacgccgcaacaactccctgtccagcacatacctgaagcccaccaattctttccacatacacagcatcaccaaagaagtacaagccagatttatagcaaaagccactccgacattctctcctttcatacctacaaaataagcgatattcaaggcaatgctggcaaaaatgaacaacaatttcaatgcagcgaacttaacagggcgtttcttatatcgcaaataagcaaaaggaatagcttggaaagcgtccattgcgactacaatcagcatcatccccatataccacggatgctctccatatcccaagaaacctgctatgggatgcagaaaagaaagacaaacgattaaaaacaagagcgcagtcgcccctaccgaaagcaaagtagtggaatagacgcgcatcggatcatccacccccttattggcaaaccggaaaaatccggtttccataccatatgttaaaagcaccatcagcaaggcagttatagcatacatattggtaatgataccatagccccccgattccacaggcaaagcgttggtatatatcggtactaacaaataattcaggaaccgcccgatgatactactcatcccatatatggctgtttccttggctaatgcttttaatcctgccatcttttaatcatcaaataatgtcttctgactattataaatgctccgtcccaggtgcatataggccagttccgtgacctcacgtccacgcggagtacgttttaagaaaccttctttaatcaaaaaaggttcataaacctcctctattgttccggcgtcttcacccaaagcggttgcaatagtagtcagccccacagggcctcccttaaacttatctataatagtacataaaatcttgttatctatctcatccagtccatacctgtcaatgttcaaggcttctaaagcaaaccgggcaatttccacatcaatccttccggaacctttcacctgggcaaaatcacggacgcgcctcaacagcgcatttgcaatacggggcgttccacggctgcgcgaagcaatctcacccgccgctttcacgtcacaaggcacattcaatatagtagcagaacgacggataatgcttgttaatacatcatcgtcataatactccaaatgaagattaattccaaaacgggcacgcaaaggcgcagtcagcaacccactccgggtagtggctccaaccaaagtaaacgggctcaactccaactggatactacgcgccgaaggtcccttgtctatcattatatcgatacgataatcctccatggcagaatacagatattcttctaccacagggctcaaccgatgtatttcatcaataaaaagcacatcattgggttccaggctggtcagtactcccgccaaatcacccggtttatccagcaccggtcctgaggtcactttaaaacctactcccagttcattggcaatgatattacttaaggtcgtcttgcccaagccgggaggtccgtgcaaaagaacatggtctaacgcctcggcccgcagacgcgccgccttgacaaagatgcgcagattatccactaccttatcctgcccgctgaaatcttcaaaattcagcggacgtaaggcattctcaaaatcgcgttccttagttgtgagctgttgctcgcgtatatcaaaattttcttccatttttttgtttatgacacaaaggtacaaaagatattattattatagaaagaaagatggaggaattcattttcagttcctctctggtccttcttttcaacattattattgtattaattattattcattatgggaattacattaggaaagaaacaattgaacaaaggaagagtttcgctttatttgaattacagttataacgggaagcgccgcaaagagtatttgggcatcatcctggacgctcctaccagtgcagagcgaagagcggaaaacagaaacaaggtactaattgccaggcagataagagcaaagaaggaactagaattcttatctgttgaatatcatctgaacgatatagaaaatacattcgatgatatacttccaacagataaaagcaatgttcccgatttctatattctgataggacaatacctggatacctatcacaaaaaggacaagaaaatggtcagggcatgtatcacccacctgcgactgtttacaagaaagaaaagcttacctgtaacccttctcacaaaagatttttgtataaattttcttgagtatctcagggatcatctccgaggtaacactcccatcggatatttcaagaaattcagaatgtgcatcaataaatgtatagaaaaaaagttaatgacctctaaccctacagatggtatccgcctgatgcagtttgatgaggtaaccaaagcaatcctcagcttaaaagagattcagaaacttgctatcactccatgccccaataacgaagtaaaaagggcattcttgttctcttgctattgtgggctgcgctggtgtgatgtgcaccaactgcaatataaagacatagatttctcatcaaaccgccttactattctacaacagaaagtacagtcacactccaaaaacgcaatcttgcatctaaacttaaaccacactgccatcaagctcctgcaaagacataaaggcattaacgaggagttggtattcgggctcccctcctattcttacacactaagaattttaaacaaatgggtcaaaagggctaatatacacaagcacatcaccttccactgtgcccggcactcatttatcaccaacattatggcaaatggagctaatatcaagaccgccgccagccttgcaggacattctacgacccggcacactgaaaaatatgttcatatcatagatgaactcaaacaaaaagcagtagatagtttaccagatattattgtcaattataaataaaaaaaggacctgaaacggcccttgcatcattaaagttgtcacacatataactggtgttcaaacaattagtattactgtatagtatccggcacgaatacgacctacctgagtaatgcggtgaacaactacttcggatgcaatttcaagcagctccttaacaagtatcgtgttgagtatgcaaagtctttattactagagggtacgtattcagccagttctctttttaggaagtgtggttttgcatcccaaagcgttttttatgccgcatttcataaaattgtaggcgcatctcccttgcagttcctatataaagcaccatccggacacagaaaaagatttaaagtccttttataacaataacattttgagtttttaaatttataaatttaaagtttttctattatgaacaaaaaatttttaagtgcaatcctgtttggagcccttatggtcacttcaacaggaacatttgtatcttgtaaggattacgatgacgacatcgaccgcttggatcaagaaatatccaatgtgaaagatgcaatcaaggcccttgaagacaaagtaggctcaggcaaatatgtcgaaagctgtactccgttcactgatggtaatggtggttatgaaatcaaattcagtgatggagagaccattaaattatacaatggtgcaaaaggagaacaaggtgaaccgggcaaaccaggtactccgggtactccaggtacttctgctgatgattatgtagtatcagtagaagaaggtgaatcagcttatgaattagttattacttatgctgatggcactaaaaagactatcagtatgcctaaagctacttctgtagttagcggagttaagtttatccctactttcctttctgaaggtgaagctgccagaatccatttccctaccatcgttactgatagtgtggcaggtaaaacagagattacaggtgcagattggagtacaaataactttagcacatttaaaatcgtttactcaggtaaggcagacgtgaagtatcaggtaaatcctaacagcgtatcattcaaagatatggaagtggtaggatttgttcgtgatactgctgaaatatggaactacaatacgaataacaggaattgggaattgttcaacgccggacaaaaactgtacactgatggaaaaattaccgttgaatcttataaagaaggacatggtatgttaaacttccgtgtaaaggactgggcttttgctgaacaatctaatctggacgaaagaacagtatattcattgagaattaagaacaatgaccaaatcgttcattctgattttgttcccgccaagcatgaagtaattttgcagaaaaacgtacatttggttaaagtagctgatgcatttgaccaaactaacgctcctgctcagattaaaaatgcaattgctcctaacaaggtaaattatagagaattcatcaaagatgaatattatcttaacaccttgaatccgaccggtactgaagaggctaaattgaaggcttatcaagcagataaagctaagttcgaagccaatgctgaaaaccagttatataaaggagatgctgaatctaaagatgatgcagaacgtattgttgtagaattgaactatacaggtgatggacattcaaaaaatttgaaggacatcgtaacttcattctttgacaaacgtatgggtagagcccaagacgctcagtatcctttgatggagaatggttttgatgactattcattggtgtttgaaccggttgacttctattatgatggcgttaaccagacaaaacgttatttggatgttaccaaagatggtgttgctacagtaaaacaaactccggacccgatttggggcgcagaaactgatgccagccacacagctgctatagacagaactcctattgttcgtgtgaaactggtagcaccgggtgaagacaatggtaatgtagttaaaacagcaatcatcaagattcacattgtacgcaagacagttgttcctgaaattaatattacagaaacaaaagatgttactctgaaacatatcaatcaagttcttgacatggatatggataagatattcaaccataaagatgtacagttgagtaaagacgaattccgtaagacttatgatttcgttcctgaatttgcaacagcagatgaggctaaacaacacgctgtatatgcatgggatggaaaagataatgcagactattcattagatccgaactttaaacctgaagaatacaatcagttgttcgttacagtgaagaatacagcattctctcgtcatgacgatcacgacgtttacactgttaagggtacatacaagccaaatgctgatcataagggattatctgacatccatgttacttatactatcaatgtgaagtatccggatgtagttgctcctgaaaagactaagttgaactgggtagatgattcttacttcattgctcacggtagatacgataactttgatgatcctaaaacttatgaaatggttgcagcattgaatgacgaattcgatttgatcaactataatccttataagggtcagactcatgataaggattgggctagagctaccttgtcattcgaattggttgaccagcataataacgcatctaagataggtgacggtcacaattccggcatccgtttgtatcaaggtaaagacaacaagtggtatatcgctttggaggctacagacgaaggacgtgcttggatcaatgctgctgacgctaaggatttgaagaagatcaaaatgcgtgctgtagtaagcttcaatgaagatgttgacggattgtatggtacttgcaacaaggaagccaatgctcataacaagtatgctaaagaagattacaataacttctcttgcgatactatcaatatggtaaacaatactccttgggctaaagatcatactactacttatactggtgctcctgctcctgaaaatggacgttctacagtggttatcgatgaatttgaagttgcatttgtaactccgatggtattccacgcttacgaagcaggtcctttgtatgacaagtatcaggaagctgaaaatacagtatcattgaaggatgcattcttcttgtcagattatctgtggtctgaaggtgctcaggcacaattcaataacaaccatgttatctatgatcacaaagatatggctaagaataatactttggttcagacaggtgatcaagctggttggtcaaagaaactggtagttgaccataatgtattcgatgttaatacaactgttaacttcaaggtttctaaggcatactttgctgacggaagtgaactggatgctgaaaacatgaagaagatcaaacttgataatgctaaccagactatcacatggatcaacaatggtgaagatattgctcaaccatttactattgatgtagaagtttgtgtaaatcacaagtggggcggtatctgcgaccatacttggaagaatgatcgtggacattctgttggaactatccaaatccaagttaagaagcacaatgacaagtaattaatacgctcattgtttataaaaaaagaggggggcaaaatgttcccctcttttagtttttataatcgtttatccaattatattgtgtatgaagtatatatatgctgtctgttttctgttattagtatgtggctgtcataaagaaaatgacacccctgttgttttacctgcacggacactattggtttatctgggaggagataataatcttgatgccgaaacctatgacaaacttgttcaaattaaaaatggatgggaagacgggacagatggaaatataatagtgtatcaggatacaccatttaaggactctccacgattgatggaaattgatggaaaaagtgagaaaggctatattaccatacatacctatgaccaagaaaactcagcctccccccaagtgcttaaacgagttataaacgacgtaactcggctttatcctgctaaaagctacggtctaatcgtgttttcccatggcagtggctggcttcctccacatacattggttaatggctcgcggtctatcatcatcgataatgacaatgaaatggaaataacagattttgccatggccctcccggaccatttatttgaattcataatctttgaagcatgtaatatggcaggtattgaggtggcttatgaattaagaaataaagcagcatatatcatggcttcctctgccccagtagtatctccgggatttactcctatctatgccggcagtatttcctgtctgcttgaagaaaatgctgatttgcaaagatttgcagaaaattattttcattattggaatttgatggaaggcgataaacgttctgctaccattagcataataaaaactgccggattatcaaatttagcgaatttgatacgacagatcaatacggaaatatccggctcttttctcccggtcggtaaccttcaaaattatgatggagttttaaaagccccattctatttttttgatttcgctcaatattatcaatcattatcagatgaaaatacatacaatgtacttcaagagtgtatcagccaatgtgtggtttacaaaagaaatactcctttttatgctacggaagaaggaacattccctatcacggccttttcaggtatgaccacttttatcatgcagagagaacttaatgacttgaatgaagaatatacaaaactacaatggtataaagatattaatacacattagagaatatgtataacactgacaaacaatgatatagcaaattcagtagaagaagtatatcttattgcagaatagatagattctaaatacttttcaaagtatcctttaaaggacagaatgccaatatatatggacagaaacaggtgattatccattaataggaaacggaaaaacttgtcataagcagaaaaaacaaatcctttatttgctttgtttgtcatttactaatatctttgttttatcattcattctagaaccgcaacaaaatatgaaataccctattggaatacagagttttgaccaaatccgtgaagatggctatgtatatgtggataagaccggtttgatttacaacttggtaacacaaggcaagacttatttcttgagccgtccacgccgttttggcaaaagcctgctggtaagtacccttgcctgttatttccagggacgcaaagatttgtttgccggactggaaatcgacggattggaaaaggactggtatgagtatcctatcttccgtatagactttaatggaggactgtatacacaacccggaattctggaggctaccattgaaggctatttagggaactgggaagatatttatggcaagaatcctaattatacaaccataggaacccgtttcattgaaatacttcgccgggcttatgaacagacagggcggcgtgcggtggttctgattgatgaatatgacaaacctattttggatgtattagatacggaagcttgtttttatgatgattatggaaagcaagttctgttggagaaccataaccgggaaatattgaaatccttttattctacctttaaaggagccgatcaatacttgagattcgtattgttgaccggagtaacaaagttttcccaagtaagtgttttcagtggatttaaccagcctaaggatatcagtatggatgaacggtacgaagccttgtgcggtatcacccagaatgagctggaagcatttttcgaagaacccaccatacagttggctgctaaatatcagtacacagtgaaagaaatgaaggaacttctcagacggcaatatgacggatatcattttggagagaggatgaccgacatttacaatccgttcagcattcttaatgcttttgacagtatggcaattcgtgattactggttctctacaggtactcccacctatttggttcgtctgctgcaacacagccgcgagcagataaacgaacttgccggacgttattatgttccctctttgtttgtggattataaggctgatgtggaacagcctctacccatgatttatcagagcggatatctcactattaaagaatataatagacgtatgggaacttatctgcttgattttcccaataatgaggtgcgtaaagggttcttgtccgtattggcagcacattatttgaaacccggaggtggagaggtcaacagctggattatcgatgctgttacttgccttgagcaagggaacacctccgctttttgtgattctctgaccgcctttcttgcaagcatcccgtatgactctcacgcttccttgaaggaattggatatgactgagaaacatttccaatacactttttatctgattctccgtttgataggagtttattgccgtgcaatccattgtgagaaccgccagagcttcggacgagtggactgcatattggaaatggacgaatatgtttacattttcgaattcaagatggacggaacagcagaggaggctttacagcaaatagcagagaaaggctatgcccgatcttatttgaccgataaccgtaaaatagtctgtatcggggtgaatttttcttcccttacacgtactgtggaagaatggaaggaaataatttacaggtaagatttagtcatagtcagcctaaagcgttaaacaaaagattgccttccactattttttatgggaatataccggtaagaatgtttatgctgttgccggcataacacatttaattttcatctttttatcattttgtttttctttttgctaagaatgaattattttcgcagccgaacacaagtttaatttcttaccgacaataagcagacatgctttaatcctcgaccaattcaacttgtcctcattttaattttaacggataagctgatgttttgtccctcactattataaaataaaagaatgaaaagatcactgtatgtatcgctattgacgatcatgtacttctctgcctgccaaggtagtgaggaactagagcaatcacaagaaaaagagtacacggtatccattatggcaagaatcgggaaaacagtttccggagcacgctacttgcaagatcatgaaaatgccatcgctagttttagtaaaaccgatgatataggtgtttttatggacaatgacagtgccgtccgctggatattcgatggaacttcctggactacagaaaagagtgtcttttggaaagataaaaaccaggaacatactttttacgcatattatccccactccggttccaaagccgaaagtaaggaaaatataaaaatgccttctctcgacagccagaacgggacttgggaaaatattgaccaatatgactttctagtagcatccaggaagctttcctacgataccgaccttggcaatgtggccttttcgggcgattattcatttaagcacgttttgtcactattaaagataaacataaagggtgaaggagatatggcacaggccgttattgacaaaatcagacttgaaggaaatgggttgacgacccaaggatactactcctttgaaacgaacagcatcaccatcagcgaaactcccaaggaaaccttccagattactccgtcacacaccatgaacaatcaggatatttctttttattttatcctgaacgggggcgagaatgacggaaatattgatccgaaagccgtgaaaaaccattctgttaatctcaccattgaatatacccgtaacaacaaatattacataacacgacgagacgacctgtctccgggcttattgtccggatgtattcataaatacaatattgtagtaaaagacggaaatgtaattataacgggaggaagtatttcgggttggactccgggaaatgaagaagaggatatagttataaatggagaagaaataaacccacaaacaaataatatgttatgaattatagattaaccgaattaaaggtgcttctgtttctattgctactgtctgctgtttcttgccaacgcccgatgtatgatgaagaagacgatgaagacggagtctcgcaaacaaatcttcctttaaagatatctgccaggtctagcggagaatcccagattaattatccggcctatatctatgcgtttgcagaggacggcagctgttctgccagtctgaaaatgacagataacgcccagattgaaatgaagttacctcctgcccgatatactattgttgcaatagccggtttgggagaagaatatatcgttccgaaagatcctagccttgatgatgtaattgttatgaaagaaaataacagaagctcacgcgcgctaatgatgggcacttcaactgtgacaattgccaataagaaaaatatatctgtttctgtaaccctctattatgctgtatctttagtcaatatcagtttggaagatataccggcaaacgttaaaaaggtgagtttgcagatttcgcctttatattcttccctgtcgtttacaagggagtattccggcaaagacaagagtacggaaattatttgtgagtctgagccgggtggaatttggagtgcaaagcctttttatatttttccggggagcggctctcagactgttttttccataaccttggaagataatagtcagacaaagacgtttggatacactttcaaaggaaagccggaagcgaacgtgccattgaatatcgggggtagctattcgggtgatgtcacggtagggggcagtttgatatcaggtgaatggaaggctccggtagacatcaaattcaattttggcggtgctgatgaaggtaatggcggtagtgagccgcctcccattaatccggatctttccgggctacccgaaattggcggtatctggaacggcggtattgtagctggcatagagaatgcaagttccacaggggcggatattttgttgatgagtctggatgagtggagtggattcgcttccgatgtgcggaatatcatacaggaggaggaagcagacggatggcatcttccgactgaagaggaggcaaaaatattgcataagacgttcagcggatcatcactggatgaactgaatgaaaccatagagggattaagaaacggagacccgttattggatattgagaaacggtatgtatatgatcataacgggagcatatatgcattcggatttaaaacctcatccaaatttttacaggcagggagtacggtgaaatacaaaatacgtttggtatgcagcgctcattatgatgccggatgacccattcatatactagaaaagggcattcacacttcttgacaatatatgcttgagagtgtgaatgcgtctaatcgacttccataccgggaatctcatttccatagataaattctcaattaattgaaagttaacattctaccacccggtatacatttcccttggtggtatgtacccgttcgcccagctggggcaggatacggctcaggctgtaggcggtcatccctctcatgatcgaaggatgggctgccttcatgcgttcaaacagttgggtggcggagaggctaagcacttcctgcggattgtcctcttctgtagcaaagcgaaagcaaaggcggaacacctcttcttcgggtacatgcttgtagaatagggcattatgttgctgtatagtctgttcctcttctttattgaaccagcttcgttcaccggatagaagttctgttttaagctgggcgtacaattgcttatgctctacggacgtggtgcagtctatggcatgcttcagactgacgcaaagaaagcggcgtgagccggtgcggtctaccagcaaatcctcccggttgctggtgccgatgaacgaggcaatacggggaagcgatgaagcgctgtgtttgtaagccttgcggatattcagtgcggaagcttgcatcaggttcttcagcaaaggcattttggacgcacctagtttgtcgaattcatccaggttgattaatccgtaggcagccagcttggcttcggcggatgccggggagcttaggtcgtaactttccgtgtagtaggatttcagcctatcgggcatcagcagacggcagaacgtacttttccccaatccctggcgactgctcaccagcaggggagccacactgttggcgcggttgttatccggattgagctgcatccattgggcagagactcccagcatccaacggtggaaaccgttcacccataccgggtcgtcggacaccctgcgtgccaacgcggacacccggtccgtgccgtcccattcgggaagctgctcaaaataggcagtaaagggatggtattcactgatgcggcgtgagcgcacaaagcgttgaatgtccctgtcccaacagtctatgcccgtttcaatagcctccagacttagtgagttcatccatcgttcgtccactttggcgtaacgcagatgagtatcgggaatgttgttttctacacttgccacttcagtttcttcagtaagcacattgaaccggaagcggtagcgggagatgaggaaagcggtcacttcctgcatcagggtatgtgatttcgctttcttgccagtatcttctggggaggttggtcccgcttttttctgaacatcttttttcaagtgagcggaatccttctctgtcttttcagttgagactgtcggatgtgtccgagaatcgtccatactccccggcaggttatccttaccgttttcagtaagaagaacctgtgagtcggccatctctcttactccgtcttcgtccgacacgatgtagtggtaactgcccgtgggagcattcccgtcggtgcgcggagtccagttcaatgccagaactacttggccctcgcggatatccagcgccagacgcacgccgggtatagtccggcaaagcggcatcagcccgttgagagcggatacgagatcacgacgcggtgttccgtcaataggaacagggcttgacaggaatttgcttccgaagaagactgttttgagagtagcgaatacattcatgagttacttttttaagtttggcaaactacaaatatacaacataaaaaggcgtttgtcaagagggggcggaaatatggcagatcttggtgcaggattcgatgaaacttggtgcaagatttaatggaacttggggcaaaattcaatggatacagggcgcaatacatacgtatgtgtaggccgatgcttgcgtatgtgtgacccgatgcttatgtacgtgtgggcttacacgttactaacacgcgagctgacacgttactaatgttggggcttatacgttactaatgttattgttgaatacgcctttatgtttttaaaatacaccttgagctttaaaaaatacgtcttcaacttttaagaaaacatcttcaggcttttaaaaaacaactatacgtttttaaaacacgccagcttgttcagtgcacagacttagcctgttcagcttacagacctagtctgttccgtgtattactcccccactaatccgatacgctcccttttcccctcatcctgtcatcttatgtaatatgcacagaaaatcagccggttaaatctgaaaccatttcccctcacttccatttcagcccgtatcgttttattccttcacaaaaaatgtgaaagagcaggctgaaaggaggctgacagagcaatgacaggagccccttcatagccggaacgcctatgggcagggagtttcagcgatagatgaaaggagaaaaggaacaaccggattttatcgctgaggcatttaaaatgaagataatctcagcatttccacctgcgaatgaacagatgatcatccatgttttgagcctgatttattatcggcacgaaagatttatatctttcaggctatgtaacaataatcctcccggtatttctatactcaagataaattatatcacaattcttgctgctccaaacagaaggtatatttgcaaaatatacaaatgatgcttccggcaacggagtaattctttcttcgctttctttttaggaattcatctaacgaacaattttattatatgcaaaacaattgcgaggcctgtttatgaaacatgtgttgatattaaaatagcaattactgtggaaaatcaactgtcatccaacacattaaaaacacattaaccaatgccactataatagcattacatgatttctattatctatatgtactaaaacaatatattctgttagaaaatctgaccagtaaaaaagaatattcatctcctgaaagccgagttctgttccaattattaaataaaatattaagctgattcaatttaataaggacacttcatagagtgtcctaaaaaagcataggttttctgtatgtcgcagaaaatgagtatctttagagtgtatctttctcatggatagccccgtccctttttacaagggaaactacatgtcctccagggacaaacacatttttgttatcgcataatgtggaagtaccttatgtttaaggtgttccactttcttctccagcaaatccggtttatagttctttttctggcgtttgatctctacggcaaccgccttatctttttctaggcatagggctacaatgtcaatttcatatgcatcgccttttaactcccaccaagagcctatatctttataaaggaaactttctgcaaacttctgcttaaaataacgctccaacatttttccggaataagtgggatagtcagccttgataatggaacgtaatgccatataattctttatttcaatgagagagcggtttttatcaaaatagttaaaccagaaactgataaagttatcctgtatttcatatcggatagccagtgttccctcctttgatagaatagggcgttggcgtacaatgatattgtaatcttcaatcagtcttctcaaataaccgccaatgcttttattccctaaagccgcttctatttctgcctgtgtgtttttgccatttgctatggcacttaaaatagaaaaataggtcgcataatttttgccgaattcttctattaaaagattctttccttcatctgtaaacggggagttatcacggaccatgaagtcgatcattccattgatgttcaatatacgattgtcacaaaacaattcaacatatttgggtatacctccggtaaatgtatacaatgccaacaaatcgtcattcgtatatgttggataataatcatacataatttctttaagtacagggaggctgaagggtgaaagctttataataatatcggcacgcccaaataacggctctttattattttgaaagatcttattcatcaaagaataaatggatccacagacaatcaggttcattttggtctcttttctgtaacgatcccaaatgttttgtatatcgctataaatggaattattaatattatagaactcttgaaattcatctataaccagattgaatgccctttgtcccgctatttccatcatatattgaaataatgaactgaaagaccgtatctctgctggtacaaagatattcaaagcgcccgaaatgagggggataaactcactacagagagtagcttcataaataggtatacagtaggcatttcgtccacagccttcattataaggctggttttccctattctacgtcttcctgttataactgtgaggcgtgaattttcttcaaaagacaggcgttgtatccttttcaactctgccagttcattttctctattatagaatttcataagctttagtaatctgtgttactgtaaccgcggttacaaaaataataatttaaatgaaacaaacgaaagaatggaaggtttatttagtaagttctttaggtgatatgtaaaggtatttattcaagatataaattctaggagatatttgaatttatctagaattgattcaaataacaatatgggatatctgttcatgacaatagagtaatcatattgataatcagtaaaataatatctttttgtatccggcacgaatacgacctacctgagtaatgcggtgaacaactacttcggatgcaatttcaagcggttaataaattcctacagggtggttcgcgcgaaggagttgctggacggtaaagattgcccggtgaatgagcttttcagccgttgcgggttcgcctccaagagcgtgttctatgtggcgttcagaaaagtagttggcatgactcccctgcaatatatatcgcagagtcgaaatccttttatgattcaacgcaattaagtccttttataacaataaacattttgagtttttaaatttataaatttaaagtttttctattatgaacaaaaaatttttaagtgcaatcctgttcggagccttgatggtttcttcgacaggaacatttgtatcttgtaaagactatgatgatgacatcgatgctatcaacaaggagttgacagacatcaagtctcagctggcagctttgcagacagaagtagatggcggtaactgggttactgaacttgttgacgtagaaggtggtttcaaggttactttcagcaacggaaagacttacactatcgttaatggtaaagatggtgcacaaggtgagccgggtactccaggtaaggatggcaacggtactattgttgaggtaaaagatggttactggtatcttgacggtaagaagacagagtatgttgctgttaagaaagatgatttaggcaaggtaaaagttccttttgttaacgaagccggaatgtgggtgttctacgacaaggatggtaatgaagttgtttctgaatacaaagcgcttggtgctacttatgtagtagaagccgatggcgtttacacattgaatgtacccgatgccgatggcaaaatgcaggctataaaattgcctactgcaggtgctacattgaccgacgtagaattattgggatgggctgctttggataaaatggataagggtttatctcaaggaagtgatattcgaactacacttaatatagaatatgcttttgtaaagaaaattattcagacttgggatcataataaagaaactacttggtctgcacagaaaactgtagctaaaggacaggtattaactactttggctcctaataacacatatttgatggctcgtattgatgcaggtgctgatgcagctgatatgagtttctctttgaaaaattctaaaaacgcagttcttcctgtttctttaagtgctgctactgaatataagggtctattgtctagaggcgcaaatggcatgtatgctattgcattagacaatacagatgctgtatacactggtgctggtaagtatacaggccagtttactaatggactatacgctttggtagaaaagagtggtttcatttctaattacaatttggatgttactacatcagaagctatagttgtcgaaggaaaagttgccacagtggatggaaaggaaatagtagtcgatagtgaagatagtagtaagaaatactatgaagtaaacttaaacaaagacaatgttattacttttgatgaaaacgagaagttcgtttatgactactatgtagaagctgtagatccaactatcgctaagttctttggcttctctgcagataagagtaatggtactttcaaagtaactaaattgtctgatgaagtaacatacgctacatttgatatcaatgtatacaaactgcatattgatggtaagatttacaaagaaacaattaccattaagccaatccgtaccttgggtaatgaagttgtttatgacttgggcaatgtacagattaagaaatctatgaagttgaatgtgtctttggataaaatgtttactgctttgggtagcgatgctgaaatctggaagaacacagctttgggtgttaacggtgctgatgctacaattgtaaaagatgcagataagagtgaaggacctaacattacatacacttacaaaaaagctgatggctctgaacttgctaacgttaacggaactgcaactcagttcgatgccgtattctctgctcttgatggcaccgctgctactttaactccgggcactggttatactatcactatcaattacaaacatgacagcaatgtactgaacactatcaaagttaagtttactccggttatgcctgccttgtcttcttacatagctaagagagaagctttgtggattggtaatacattgatggcttatttcgtagacccgattaaaaatcaaacggattttgcttctaaatatgaaatggagaaaggattcacgacattaggttctgatgttgatgctgatcttactgagattacattctctttggatagagagcaaaagattaacaatgttcaggttcagaatttggctaatatagcttctgataatactataactttggttactgaccgcgactttaatcaggatggtaacgtaacagaggctgatagatgggcttacggtcaagaattgaatgtgaaagtagctgctacttatttgggtggtgcttacaagttcactgatgaagagattgctgccgctgcatttaagattaatgttcaaagtgcattgaaagctggtaagattgttcctgctgctggtgcttctattacattgcctgctgccgctgccggtgaaacagctaagttaactgctgatatgattactggttacacttacaacaatcagccgtatagcttattcaaggaagctgctggcaattataagtatagctatatcgacaaggtagaattcttcactaccgatgcagaaatctatactgtaactaaagatgctacagcaattaaagatgctgaaggtaacgttattggttaccacgcagaaattacttctaagaatatttctcagactactaatacgaagattatcgtgaaagtaactgataaatacggttatactaaaactgctgaacttcctttgactattaccgtgggtaaataatcaataaaaaacagaattaaaaggagcggtcttcaggtcgctcctttttatgtttattcagaatttatttgacatcagtatctcattgatgtttagttataaacaaataaaatcccattgttacatatttttaattcagatattgtatcttggtcccaaaattattatttatcatctctctttcactatgataaagctgactatcttttaagtagtaataattagggttacctgcaaattctattgttacatattcagtattttcatcattgcgatgaatagcccatacgcctttataatgtattgagtcattaaattgaatgaaagtagtagaatcttccttcaattcaaattttattcctgtttcagtcttaaatatgccgttgaacacatgagatgaagatggtttatctacattaccgcaagacgaaaaaacaaaaagaaaatagaatatcatcccatatataaatattttcatagattgtaatgtttttgtgttaaaaaaaggacgtcctttttcaaagacgtcctttcttttatatagttttaaatattacttacctgaaggagtacctcctgctttcgcaacattcacttcaagagcttctttctttaatacaccccacttgtgagcgacttcaacagaaatatacatcttgtaatcaacgttaaccggagtaccattgttgttgaagtaagccaagtgagtaggatctttatccactttctctgcattagctttatcaaccacgccattagcttcagtagccttcatttgcttcaacgatgcattggtcggcaatttaccatctttcacaccttctgtatgcttgtatgtgttagttgcagcatcgtatgacaaacttgttgttaccttgtcagtcaagaatttaacattatgaacgccatagtaatcatatagttcatgagcatactcaccgttcttaacatccttgatgtcttgagcggcaactttattaccattccaatctgtgaagttgaatccgtcagctacattcaagaagctaccatcaatttcagcatcaacgaagttacccttaatagcaccgtcaatagataacggatcgataaagaatacttcaaattcctgaacagggatcacattatagctgttatattcaacaaccaagtttacaggaactgacttacctaccaatgcttgggcagccggagtaccgttcagtttgtcaatttcatgcaaacgtattgtacttgtacactcatcatatgtagagcctaatgtttcatcgaagttccatggcaagaacttggaatctttgtttgtgtcagctgttgcacccattacgttttggatagttgcagccaaagtcttcttatcagcttggatataatcaaattgatcccagcttgtaggagcagctcccttccataatgaaataccatctgcacttacattgtaacctgccaagtagtcatacttgttgaagcggctttgatcgaacacaaagcgtacttctgcacaattacggatgtacttaatgaactgagccaagttagccggtttagcattttcaggcttatagatgtaaccatttacaagatcagcagagatatggctgtaatctttcaaagcacagtcgttgccgttatattcatgggcatgatcaggtgttagaccgttgttattagcccagctatcttcagcagtattgaacacgataggattaacattaaatgtaccttcacctatgccattcttccaatatgttccttggtaagcaaattcttgtttcggaacaacaatttcttgattaaatttctggataatgttacctactgttccaagttcgtctatatattcaacttcaatctcgaatttagaagcatagtttccatccttgttatccttcaatgttccaacagttttttcattcatagcccataccaagttatatgaggtattatcctgtgcatctttcaagaagctaaataacaagtcaacattattctttaattcttccttaccatctttgatctgcttagagtcaccttcactccaatctgcatcagcattaactgataggttcagcttagtcaaatcgatttctacgccgtccttcttcaaactcttgattttcagtgatgtaaagactttatggaattcggtcttactcatgctctgaccaccattaaacttaacttgatgatagatagcctcgttcatatctttagagaacaactgctgatacatatcatgacaactgatggtatcgtttgcaaaattaaacggactcaatacttgctcttcccctttatcgatccaacgaactttgatgtaacgttgtgcaatcaacgcattgtcgtgttttgtatcaatcaatgaaacacgcacaatcggttcacgaccaatagaagcacgagagtattgattgtcgtccaaatctacatcataaacttctgatttcaatctgttaccactcaaaatcttagcaaattcctgttcgtctgtatcacgatctccttgcaaatatttttcagtagctaaagagaaacggaattccaaaccgtaatcagcataattcttcaattctttatggttgacatgattatttgttgtagtagtacatactgtaaccaaagtattcaagtctagcggttggttgtatgcccattctacgtcaacgagttcattatttcctgattcatacaaacacacagagtcatgatagtgaacatatatgtctttaccattttctgcatttttttgaatttcatcagcaaatttgtcttccaatgctttagtaaaatcagttttagagttagctaaataaggaatagctacaatttcttcaatgcgtgagtattcagagtttacatatacgccatttattttaccggctgctttgtccgctttttctgtttctgtataattagactcagtcacaggagctttcaaagatgccatatagaatgtttctgtagtaccgtttgtagtagtagtgatgggtttacccaagaaatcatcactcttcttgtaagttactgtcagtacaccatctttgatttctttaccggtaggaacaatcggactgtttgttttgacttcagcgcttcttttcattgtattattcgatgtgatacaatcgaaagaaggcaactcaatatcttcagtacgaacccccatgctcggacttacatggaaatatgcctcattcttttctgtagaaatataacgaacttctccagctgcaacgtgatccaatacgggacggttagtatgtttgtctggaccgctctcatgtttcgccattggcttatatacctgtggagtgtactgtaaggtagtcagagtaatagcagctataccattgatatggtctgtaggaatcaaagagagactagtcagacgatgacctattacttgcatgatctcagcgctcagtttatccactttgtcattcaaagcctgcaaactttccgaagtgatgaaatccgctttcaattcttcttttaaagctgatatttttttgtctacactttccaaagaagctaatttgtcaatctgagtctgaatttcctttttcaagttttcaaggtctgattcagtaacgccgctgttactaccaccttcttcagcttttttcagagcttcttcagctttcgcttttgcttcttctgctgcttttttagcgtcagctacagaactttccatggtagacaccttttgggtaagttcttcaagtgaggcttttttattcagctgttcctgcaaatcctcgatgtcatcatcatagtctttacaagacacgaacgttcctgttgacgaggccattaaggctccgaacaggactgcacttaaaaattttttgttcataataaaaaaactttaaatttataaatttaaaaactcaaaatgttattgttataaaaggactttaaatctttttctgtgtccggatggtgctttatataggaactgcaagggagatgcgcctacaattttatgaaatgcggcataaaaaacgctttgggatgcaaaaccacacttcctaaaaagagaactggctgaatacgtaccctctagtaataaggactttgcatactcaacacgatacttgttaaggagctgcttgaaattgcatccgaagtagttgttcaccgcattactcaggtaggtcgtattcgtgccgactattgaactaaacttttctaaagagagttttgaatccaaatatacttttctgatttctaggttatacaaaatgcttttatagatctcaaaatcaacttttcttccgggcgctcctttctcggtagacagtgtattccactgccgttctgcatctttaaacagcttttctttctgcgttgtagtagaaagctcattgctttgcgtttgaaatagaacatccatattttagtcagtttctataatagccataatttcatcggacaaaagtacccattttactctattctgcaagactttccactaaaaatctttataaaatacaggaatattttaagaaataggaatatctctatattctttaccttacaaacaaccatagaaagccccatagacctattaaaacaagacattactttcactatacaccttaatataatagcataagtacgccgaagaagttaaacttataacagtcaaaatatagcttagtctctataaagcggaatccagaacttgtaaattatccctttattcaacaaaacaaaccagaaaagaacaaaataatccaatataaatatgtcattcattttctaattaagaattattcaaactccctaaacatgggatttttttgttcatccctaaatacattttaactaatatagcttaccgtatcacttctattaactaaaatagaaaaaaagatatttaataataattttttacattcatataaagacaatttttatcacctttacacatcttatctatatatttggctacctttggacaaaagtcactatatttgcgtttatgaaaacatatacaagcaatcacatcgtatttttttcgcctacacatacgtctgcgaaaatagcccgtgccatcggagaaagtataggtatgggcagaagaatagaaatagatctcactacggatgagaatagtagcccgatagaaatcaaagattctatcacgatcattgcagttcctgtgtatgcaggcagggtagccccaatagcattgcaacggctacgaagattaaaaggcaacaatgctccggctatcttagtcgctgtatatggtaaccgcgattacgaagatgcactggtcgaattgagagatgaaactattcaattgggattcaccccactggctgccggtgcctttattggtgaacacagctacagccgtcctaatatgcccattgcagaaggccgtccggatgttaccgatttacagattgcggaacaatttggaaaagactgtctgacaaaactggagaaggatgaaacattatccgatttttacctaaaaggaaacataccttatcgctttgttggcccctctactcctgccgctccagtctgcactgaaggatgtttcgcctgtggcgaatgcatcgaagtatgtcctactcatgccattgctttaagcgatgaaggaaaaatagaaacagagattaccaaatgcatcaagtgctgcgcttgcgtaaaagaatgccctaatggtgcacgagtttttgatactccttacacccccatgctacaccaaaaatgtgcggcacgccgtgaacctgaactatttatataatgaataacagagataaaagagtcctggtaggaatgagtggcggaatagacagctccgccacgtgcatcatgctgcaagaacaaggatatgaagtggtaggagttaccatgagaacgtgggatgtcccttcccgcttttccacccccggtcaagatgaacctgatgatgtactggaagcaagggccttggcagaacggttgggaatagaacaccatgtagctgatgtgaggaaagagttcaaacagattattgtaaaacacttcatagatgagtatatgcaaggaagaactcccaatccttgtgtcctttgcaatccgctattcaaagagcgaattctctgtgaatgggcagaccaaacgaattgcgcccatatctctaccgggcattattgcagactggaagaacggaagggaaaactgtatatagtagcgggagatgaccagacaaaagaccaatcctattttctatggaaacttcctcaggagatacttcaacgttttctctttccactgggaacttataccaagcaggaggtacgggaatatctccgacaaaaaggattcgaagcgaaagcccgtggaggtgaaagtatggaaatctgctttatagaaggggattaccgaaactttctgcgttcgcaatgcccggatattgacacccaagtaggaccgggatggtttgtaaatagcaaaggtgtcaagataggtcagcacaaaggctttccttattatacaataggccaacggaaaggattggaaatcgctttggggcatccagcatacgtactacgcatcaatgcagaaaagaatacagtcatgttaggagatgccgaggaacttaaagcagaatatatgttggtagaagactatcatatcacagaaatgcaggatttactgcaatgcaaggacttgtcagtacgtatccgctatcgcagcaagcctattccgtgtcaagtgctcgtattagatgaaaaacaactattggtccgtttcctttccgaagcatccgccatcgctcccggacaatcagccgttttttacgaggggaaacgagtattgggaggtgcattcatagcttcacagcgcggcatccgaaaaattgccgcagataaccaagataaattttagatgatgaaaacatatatcggatatcttattttcatgtgcagcttattattatgcagttgccaacagaccacaagcaatcctcgtttctacgacgagggcgtatcgcaagaactggcaacactgcgcaaacaggagattaaggagttgaagtataagctatatttctccattcctgaacagaaatcagtaccggtaaatggagagattaccattgaatttaatctggatgcaccgcaagaaattattctcgacttcagagaaaagcctgaaaaaataaaatcggtatccgtcaatggacaaactgcccgttatgaattccataacgagcacatcatcctacctgaaaaaaacatagtagaaggaaaaaataatatcacgatcaaatttattgccggaaaccagtcgctaaacagaaatgatgaatttctgtatacgctattagtgccagaccgtgcccgtaccttattcccttgtttcgaacagccgaatctgaaagccacattttccttacgactggatataccaacagaatggaaagctgtttccaatacctatattactaaagaagaaacaaaaggcaactgcaaaacagtaacttttgccccaactgaaccattaagcacttatcttttttcctttgtcaccggtaaattagaacatcaagaatatatagaaggtaaccggaaaatctcagcatattaccgcgaaacagattctaaaaaagtagctcaattagataccatcttcaaacaagtgaccgcttcgctgaactggctggaagaatataccaatgttccctatccttttgccaaatacgattttattatcttgccgggattccaatatggaggtatggagcacacaggcgccaccttatataatgacacgcaaatgttcctaagcgaaaatcccactccggatgaagaacttcgccgaacccaattaatcgcccacgaaaccgcccacatgtggttcggagatttagtaacgatgaactggtttgatgatgtctggactaaagaggtattcgccaattattttgcagctctgattaccgaaccattattcccgcaagtcaatcaccagctgaattggatgaagacttatacagccgcatccttgtcagaagaccgtacacccggaaccactgctatccggcaaccgctagataaccttcaaaatgcaggattaatttatggacagatcatttataacaaagctcctgtcatgatggtaaaactggtggaatcaatgggaaaagaagcatttcgggaagggattcaagaatatttaaaaacttacgcttacgccaacgccacttgggatgacttgatacaaattctagacagtaaaacagagcaagatctagccgctttcagcgatgtatgggtaaaccaaaaaggaatgccgataatcaaattcgaaatatcagacaaacagttgaccatacatcagcaagatccatatcaaagaggattaaactggcctcaaaaattcaatatcaccctttgcggaacaagggacacaacgatagaagccagtctgacagacagcttatgccgtattacgttaccctttacccccacccgtattctgcccaatacggacgggagaggatatggtttgtttgttcctgacaacaacagtctccattggctgctggaacattggcaagaaatagacaatgaaacaacccgacaggcagttttaatgatgatgcatgaaaattatcaagcaaaaggaattccgaatactgcatggatgaatgcattactcaacggaatacattgtgaaaagaacccgttgatagcttcaacattaaccaattacctgtcctctcctctgcaagagatatcttcggcagaacgtgataaaatagaaaatgagctttataaactcagccattctcatccgattccttcttgtcgcatccagttattacgccttctgattacagaagcagcaagtccgactatgattcagtgcctctattccttatgggaaaccgaaagagtccaacaattaaatgaaagagattacactacattggcctacgaactggccttgcgcatacctgagcaaggaaaagaaatacttcagacacaacgccaacgcatccacaatccggaccgtctacgccaattcgatttcatatcacgtgcgatgactgccgatactttaaaattggacagtttattccgatctttattgcaagcggaaaacagaaggattgagccttgggcagctacaaccttaagctatctgaatcatcctacaagacaagattatgcggtgaaatatatccgtccggcattggaaaaactgacagaagttcaacgcaccggagatatctttttccctcgcaattgggtcggggctttattaaggaatcacgatagcgaagcggcctacaaagaagtagaagcttttttatcggtttatcccgactatccgcctttattaaaaaacaaaatactgcaagcggcttatcctctttacagaaaatatgcagataagaaaaaataaactgaaagaatcaaggattcattacaccttgatagacagcatggcgtaatgtacccttttcatcatcgctatcatagtcccagtacatagcccccagcatccctttctgatgcaggaactggcacttgaatgcgatggactgggcattctcataattaacgaccacatgtccttgcgaatttatcatataaggaacttgtgccgcactatcccaacaactctgtaaagaatccaaagcgataatatgacgataatccaataattctggagcttcattagtcccatgcccatagaacggaatacccaataccaagcgtccgacaggaaaacctgcggcaacatgggcggcaaccgcatcctcgcaagaccattcctcagtcatttccgaacggtacaaggccgaatggtgattaggagattcctccatatcgtatgtcatgatattgacataatccacataaggttcgacagcctttaagttgtaatatttggcacctgcctgtgtagcaatggtcagcagtttgtctttaccgatagcatagcgtatatccttcatcaacaaagaaaagttatcagtatcttccggcgaaaaagatacaccggcagttcctataccgggatattcccaatctatatcaattccgtccaaatcaaactggtctatcacccgtttacaatctgcggcaaacgccatacgtgtactatctgtctgtgccatctcactaaaccgactgcttccccacccgcctacggacagtaaaactttcaaagacggttttttttcacgcagccccactaccatttgcaaacgtggttcattatctatacgtattcctttgaaattatctgtaacatgcccgaacgcataattaatatgagtcaaacatgccggatcaggcgtactttctccccatgaggtgacatatgccaaaaccacatatttcgattcattctccgctacctcaatctgcgaagaccgctttttgtcctgacaggcaaccaccagcagcaaaaaggaaagacctgctattaatttaaaggttctcatacataataaaagagtttaaaacaatgagagctatccgatttatctgtaaccggcagcaaactcttttgaaatcgaattattcaaactcatacaaacatcggcactgaaatcctttccacaacgaatcacatggtcccagtcatcttccgacagttcatccaaatcatcccggcggatacgatattttagcaatccgaaaactactccggcgttaaaattatctccggctcccaccgtactgacagtctgcaaaggatccacttcataatgcttttttatattctttgtatacaggcgaattcctcttccaccgtgcgtgcaaataaaatgcggacaataaaattcaatcttacttttataaaccttatccgcatctgtcaaaccaaacatattctcaaaatcctcaacggagccgcgaatgatatcagcatattcaaaattctcaagaataacaggaagcagctttatcgcctcgttcttgtgagtactgcggaaattcacgtcataataaatgatagcccctttttcacgagctttatccaacagttctttcaccttatcacgcaattgaggcgttacagcataataagagccgatcatcacaatgtcatcccgatgtatttcaggcattgtcacatccagcctcaaccgtggataatctttataaaaaagatattcagcatcattctgttcattcagaaaagctaaagacacaggtgactttccttcaggaaacacgttcacatgatctgtgcttactccattctctcgcataaatttcagaatgatatcgcccactttgtcatttcccgtttcactgataaaagttacattgactcccaaacgccccaatgaaataattccattgaaaaccgagccaccaggaactgctgccgtaggttggctatctttaaaaagaatatccagaatggtttcacctatacctattacttttctcatttttatatttacgatttatatacataaaaccggaacacaaatgacacaaatcctttaataaaattctatttgcattatttgtgtcatttgcgttccggttctattttattttacttacttaactcgcgtgaacgctcacctaagtaccctccatgatggcgtttgctatactcttcgatggtaaaaccggtccttttcatggtttccactaccaaaatatcacctatcacggtcataactgtagttgaagttgtgggggtcatacccaaagcacacacttcatcaggatgcccggtgcataaacaaatatcagactcccgggccaatggactatccgcatttccggtaataacaatatatttcaaatttgggttcaaattatgtgcaagttgtgtcagttccacaatttcacgggtttttcctgaattagaaatcagaagcagcaaatcattctcctgcaaaattcccaaatccccatgttgggcttcgctgggatgtaaaaacactgccggaatacctgtagagcaaaaagtcgtagctatattcatagctatctgtccggccttacccataccggtagtcaccagctttccttttttacggtgtatttgctcaactatcaattccactgctttctcataagcatcagttataggaatattcaaaacagcctgagcctctttctgcaacaattcgtgtatagatgtcatcataataggttacatgaatattatttaagtagttcggttagttctctcaagtcattggcaacagcaaaataactgttcaacggatgatgggcaaaatgctgcctctccaatccggccaaaaagtcgataatgccattccaaaagccatttatattataaaaaattacttttttacgatgatagtccagcgtagcggccgccattacatgaaaaacctcatccagtgtacccactcctcccggcaaagctatcactacatccgattcattcaacatcacatctttacggtcactcaaattatccgtacggaaagtcacatccaccaaatcgctggctcgtccacgttcttccagcttggtcggaataactcccattatcatcgaaccgttgtctttggctgccttggcaatacattccatcaatccgatattagcacctccatacactaacgtcttcttgttttgtcccatccaaacgcccaactcacgtgctttttcaaaaaacacaggctctatattctcggatgcggaacagaaaatagcaattttatccatcatcttgttttctgttagtaaatacaaatatctgcattttttgaagaacggcaataacttttgttgtatttttgccaaccgaaacttatttgaagcaaaaaacaatgtcatacaatactttcaccttgcctaacgggctgcgcattattcacgctcccaatcagtctaatgtagcctattgcggctttgccgtcgatgccggaacccgtgatgaaaacgaacaggaacagggaatggcccatttcgtggaacaccttatctttaaaggaacacaaaaaagacatgcatggcacatcctgaaccgcatggaaaatgtaggcggagatttaaatgcatatacgaataaggaagaaacagtgatatacagtgcttttctggtagaacacttctcacgggcagcagaactgctggcagatattgtatttcacagcaccttcccacaacatgagattgacaaagaagtggaagtgattattgatgaaatacaaagttatgaagacagtccgtcagaactgatttttgatgatttcgaggaattgatttttcccaatcatcctttgggaaggaatattttgggcaaaccggacttattgcgtagtttcaaaagtggacacgccttgaattttacttcccgtttttacaaagctaccaatatgatctttttcattcaaggcaatatagactttaagaaagtgatacgcaccatagagaaagtgacagccgacatccctttttccattaccgaacgccaacggacagaaccttttctctatattcctaagacattgacactgaataaagaaacacatcaagcccatgtaatgataggtagccggggatataatgcatataatgaaaaacgaaccggactttacctgctgaacaatctgctgggaggacccggtatgaacagccggctgaacgtttccttgcgcgaacgccgggggctggtctataacgtagaagccaatctgacctcatacacagacacaggagtgttctgcatctatttcggaacagatccggaagatgcagaccgttgcatcggactagttcataaagaattgaaaaaactgcgtgacagcaaactaagttcctcacaactgagtgcagcaaaaaaacagatcatcggacaaataggagttgccggagacaattttgagaacaatgcattggatatgggaaaaacgttcttgcactatggtaaatttgaaggtccggaagaagtattcaaacggatagaaatgctgacagcagaacatctgtgggatatcgccaatgaaatgttcgatgaaaattatctttcaaccttgatatacctataaaaacaggaaatcaccctaaatttcaaacattacatttctcacaaataaaaatctaattgtatttttgtagaaatacctttaactaatatcattaatttatgaagaaacttcaactatgcattttaggaagcttattcgcagcttccttacaagcacagagtacagattacaccaaaggattgagcatctggtttgatacccctaataatttggacggacgcgcttcctggtattctcctgcaacagacaaagcatgggaaaacaactcactccccataggaaacggcagtttgggaggcaatgttatgggatctatagcggcagaacgaatcactttaaacgaaaagacactatggcgcggaggaccgaacacagaaaagggagcagcttattattggaacgtaaataaagagtcggcacacctgttacccgaaatccgccaagcatttacagacggtaaccagaaaaaagcagaagaacttacctgcaaaaatttcaacggactggccgattatgagccaagccgtgaaacaccttttcgcttcggctcctttactacattgggagaagcttacatcgaaaccggtttaagtgaaatcggtatgaccgattataaacgcatcctgtctcttgactcggccatggcaatagtcagttttcgcaaagatgaagtgaactacgagcgtaaatacttcgtttcctaccccgacagcgtgatggtactgaagttcacagccgaccgtcccggcatgcaaaacctgatattcagctatggcagtaaccctgaagccataagtgatatcaaaacagacggtcccaatcgtttgctctataccggtcgcctcaaaaacaaccaaatgaaatttgctctccgcatacaagccataaacaaaggaggaagcctgaacacgactgatggcaaattcattgtccgcaatgcggatgaagtcatttttctgctaaccgcagataccgattataaactcaacttcaatccagacttcaaagaccccaagacgtatgtcggtcctgatccggaccaaacaaccctggccatgctagacgctgccgctgccaaaaattacaacgaattatgcgagcgacacaaaacggactatacccaactgtttggcagagtcaaactacaactgaaccctcatgctcctatgaccttgcaatatcctgccgttacagatcttcccacccatcaacgtctggcacgctatcgcaaaggaaatccggactaccggctggaagaaatctattatcagttcggacgatacttattaattgccagttcacgccccggcaatctcccggccaacctgcaaggaatgtgggccaacggggtagatggcccatggcatgtagattaccataataatatcaatatccagatgaactactggcctgcttgctccaccaatctgaacgaatgtgtatggcctttgatagacttcatccgtaccttggtaaagccgggagaaaaaacagcccaagcctatttcggcgcacgcggatggacagcctccatatccggaaacattttcggatttacctcccctttgaccgatgaaaatatgtcctggaactttaacccgatggcaggtccctggctggcaactcacatttgggaatactatgattacacccgagacaaaaaattcctgaaagaagtaggctatgatcttatcaagagcagtgccaactttgctgtagactatttatggcataaaccggacgggacctacactgctgctccttccacttctcccgagcatggacctgtagaccaaggagctacttttgtacatgctgtagtccgcgaaatattgctcaacgccattgatgccagcaaagcactgggtgtcgattccaaagaccgtaaacaatggcaatatgtactgaaacatcttgtaccctatcaaataggacgttatggtcagttaatggaatggtcaacagacatagacgatcccaaagacgagcatcgtcacgtcaaccatttattcggactgcatccgggccacaccctttcaccaattactactcccgaattaaccaatgccgccaaagttgttttagaacaccgcggtgacggagctaccggctggagcatgggatggaaactgaatcaatgggcacgtctgcaagacggcaaccacgcctacaaactatttggcaacttactaaaaaatggaactttggacaacttatgggatacccatccgcctttccagattgacggtaactttggcggaactgccggtatcacagaaatgttgttgcaaagtcacatgggattcatccaattactcccagccttgccagacgcatggaaagaaggttctgtcaaggggctttgtgccaaaggtaactttgaaattgacattatctggcaggatggtaaattaaaagaagccgtcattctgtccaaagccggtgagccctgcaatctgagatatggtaacctgacttttacctttaagacaactaaaggaaagacatataaagtaatggttgagaatgagaaactgaaaaaaatccccttataaggacaaaaaaacagtcagacaaatccccctcattttttaatctattttgtcattctgaacactatgttatcttttacatctgttcagaatgacaaattatatataatatcacagtcattcggttatcaatatcctcttttcgctttgaatttcaaaacctatttcttatatttgtacaaatatttgttttaagaccttatctgaatgagaaaaaccgtctatgtaatcctggttctatgttgttttatcataaagacttattccatcaaccgtccttattatcattttaaacaactttctattaaagaaggacttccaacctctattatatccctatacgatgacaaaaacggttcattatgggtcggaaccactcaaggaatatatcgtttcaatggagaaaaaatcaagaaatataatctaccgtatttattacgtaaaaacagccattacatcaacgatattttcggagataatgaagaacggatatgggcgatcacctcacaaggaatcagttattatgaatatgagaaagattccctgcaaatttttctgcgacataatcagccggtaaaagcttccattataacaactgaaggaagcaagctgctgatacctgtaaccgacacattgcttgtatatgaaaaagaattaaaacattccaaagcaatccctttaaaaacaacaggaatccatattatcaagatggagcctttcgactccactcattacctgataataaacaatgcatgggaaataaagctattaaataaacatacaggagaaataactgattctccattcggtgaattatccaatgcatacgatctatataaggattcctccggacgttactgggtttccttctacgggcaaggagtaaaatgttataatcaggatggacaactgctgacctcctataatacccgtaattcaaacttgaacaacgatattgttcttgatataacagaatgggataaagccatttggctggcaacagatggcggcggagtgaatataatctatccggacactcatgatattcaaatcttatcaaacaaagaaaaccggcaattccctgccaattcagtcacatgcctatgccacagcaacaaccacatgtggataggtatggtgcgggaaggcgtactaggagcagaaaaaggttttatcactacctataccaaagctgcacaaaacccagcctcaggcttgtccgacaaatgccccttatgcctatgggaagataaagacggacggatctggattggtacggacggaggcggtatcaactgctttgacccgcaaacggaacgttttacccactatccgcaaacattgggagaaaaaatagtatccatttgccctttatccgaaaccgaactgctagcatccagtttttcaaaaggaatcttccgcttcaataaaaagacaggaaactaccagcgcttctctcttccggacaaagatgcagaagcaaagctggcaagctccagtgcacccaccaatatacgagttaatgatcggaacgaaatagaactatacggtaatgctttttaccgatatattcccggaagccaacaacttattcccatccacttcaagaacaaacaattacaatattcctggatctatattggaaaataccgtacttatccattttttcatgaccgaaacaatgtattccaatacaacaaagagaaaaacgaatacgaaaccatagcttatgagaaaaataaccagatattagctgcaagcattgattctttagggactctatggatagccgaacctaatggagtcaccagaattcacctgccctcaaaccgtaaagagccattaaagctacccgatggaaatgacgtaatcacttctttagtcattgaccatgaaggcatcgtatggatggggtcattgggaatcatatacgcttataatccacataaaaatcattttgtcatctacaatgagatggacggcatattacctaacgactttttagccaaacctgcattggtggcaagtgacggcaacatatatatgggtggctccgagggattggtacgaatcaacaaagctttaaaaccagcttcggctccacctcccatcacacttaagttgcaagaaatagcattgaacggcacaacagttcacttcatcccccgatcaactatggaaattccttataatttctcctccctaaaaatacatacacaactggaagggggaaatgtatttcacaagcgcatctaccggttccgcataaaagggctgaacacagaatacacagaaacatcccgtccccatcttgttttacataccatttctccgggcgactataaaataacggttcaatgtacacagaacgatggtagctggagtcctgaattcactttgctgaaattcactgtccttcctccgtggtggcaacaatcctggttcatcctattatgtgcggtcatcatcattcttttcattatctatatcataaaagctcacgaccgtcaactgaaacggaaatacaaggaacaggaacgtaccatctacaaggaaaaagtgaaagctttgatcaatatcaaccatgaactgcgtacccctttaaccttaatttatacaccgttgaaacaacttacaaacagcaaacaaatcccctatgaactccgtggcaaactatatggtgcgttcaagcaagcacgacaaatgaaaaacatcattgacatgattctgaatatgcgcaagatggaagtagagaaaaatatcctgcgcatgtcttccacgcccttcaacgaatggttgcaaagtatcctaaatgatttcaaggatgaactttcgttacgtaatatctcattggcatttactcctgacactaccatagaaactatgtattttgaccgcagtcaatgtgaaatcgtcgttaacaacctattgacaaatgcctataaattcagcgaagaaaattctactgtcactgtttccacttacctcgaaggtaatggaagccgtgtacgggtaactataaaagatgagggaataggtcttcaagaagaagatatagccaatttattcactcgcttctatcagggtaaacatagctttcaaggtaacggaatcggcttgtcatacgccaaacaactggtagaaatgcacggaggcatcatcggagcccaaaataatgaaaccaaaggagcgactttctttttcacattaccgtatagacaggaagccgccgacattcaatctacacctcaaacctatttgaatgatgcattgcatctatcagccgacatcgattacaaacaacctcaacaagacagcatagagaaatttcattctattctaatagtggaagatgatcgtgacttatgtaattacctgatttgcaacctacaagttctgtttgaagaagtctatgaagctcatgatggcatggaagctcttcctatccttacgtcacaacgcccccaaattgtattaagtgatgtcaaaatgccccgcatgaacggatttgaactatgccgctatatcaaacaaaaaccagacttaaactatatgcctgtgatactgcttacttcctgtgtcgatgacgccagtatagaagaaggatacaaaacaggagcagaagcctatataaccaaaccgtttgacatggatttactttctatccagatacagaatatcatgcataatcacaacatcgtgaaaaagcactatgccaccatagatatccctatacccaaacaagaaaatctgaatcacatcaatgagcagctgatgcttcaattcagccgcattgtcaatgaaaatatcagcaatgtggatatggatgtcaatttcatagcaaagcaaatgggaatgagccgtgcgtcactctacaacaagactaaaggaatgatggatataggcatcagtgaatacatcataaaatgccgtttggaatatgcccgtaaattactagatgccaccacactatccataagcgaagtagcagaacagtcaggattcaagcattcacgcaatttcagcactgtattcaaaaatgcaatgggaatgagtccgtccgattatagaaaaaaagattcccgaccttcttgaaaacagaaagaccgggaatacttcatgctatgttaaatttaggtcagattaggttgtcaatccttgtaaatgttacgaatagggtcatcatactgaacttggagacgtaataattccgtcttcaattctttaaccaactcttccgttccaggttgtccgtagatattatgcatctccataggatcttcctgtaaatcatatagttcccaacagtctatatcattataaaaatgcatcaatttataacgttctgtacgtacaccataatggcggcggacagcatgttcagccgggtattcataaaaatgataatacaatgatttacgccagtcaggcactttctcccccttcagcaaaggcaagaaagaaactccatgcatatctgccggtacctccacccctgcaagatccaatatagtaggaccataatcaatattttgcaccatctcatcaacatcacctttctttcctcccggcaaacggaccagcaagggggtacggaaagactcttcgtacatgaaacgcttgtcaaaccaaccatgttctcccatatagaatccctggtcggaagtatagacaatcatcgtattttccatcaatccgttctcttccaaatacttcaaaacacgccccacattacggtctatggaatggataacccgcatataatcatgcatatattgctgatatttccactcagccaaagccttacccgttaacttatcctgtttgaatttggcaatgataggatcataatgcttgtcccaaacagccttctgttccggattcagagcattatacatatttctgcccgcttcttccagtcccgttgtggtatggatctcattctccttgtccgccatcttcaggtcatacaccaaatccatatcctttataatgctcatttcctgcttggatgcaggaattctgccttcatatttatcatagaagttctctggcatcggataagttacatcatcatacaagtcaaggtcacaaagatcaggcatccaggtacgatgaggcgccttatgatgaataaaaagacagaatggtttactcttgtcccggatgctgtccatccaatttattgccaaatctgtcacaatattggtagcatagccttcccgttgtacccgttcgccatttttaataaatttcggattataataatccccttgtcctatcaggatgtcccaataattaaatccggtaggttcagataccagatgccatttaccgatcatagcagtctgatagccattagcctgaagcagtttcgggaaagtctgctggttaccgtcaaatgtggtggtattatccgtaaatccattggcatgactatgtttaccggtcagcatacaggcacggctgggaccactcagggagtttgccacaaaactatttgtgaaacggaccccttcattggctatccggtcaatattgggtgtctgcatataacgttggtcatatgcactgatagtctgaaaagaatggtcatcacacatgatatacacaatattcatgctttttttctcattcccgccgctctctttctttaccttgcaggaaggcagcgatgacaacatcgctgctcccgtcaaagaatacaatacactactggttattctattcatttttatataactttggattcattcatcacttccttaccaaccgggattctgttcccacatgccatccattacattaatcatacgctcctggataggcaacaaataatcccggttcggtttaaactgccatccattcggcattgtagaaggaggcaccggtaatatgtaacgttcagcatcatcagggctgcctgtcaaaaacatattatttccagatgcctggtcatatttcaactctggcccgtattgttccggcaagttactgcctataaacaaagcaccatgtgcgcggttacctataatcaactcctcggcagcggcccagcgcatgatatcaaatacccgacgaccttccaatgctttttccacccggcgttcgcggcgtacagcttggatatatttatccagatttctaaacggatactccgcagaagtattatattcacggtcgaaatcaatatccggcataccggcacgctcgcgcaaaggatgcaatatctctataatcttgcccgcattagccgccccgttcttctcggccagcgcttccgcataattcaacaaaacatcagcgtaacggaactgaatggcaggagtagagcctttatattccgagatataatctccagtataatctatctgtacatgtttcaacatcacataaccggtcatgttcgttccaaacgctgaaccatcgccagccaacgaggggaaaccgacaacgtacggattaccagccccagcaggttgcatgcgctgtccaggcaaggccacagtctgcgacaaacgggggtctcggacagtaggaagcaactccgtaggatagacacgcttggcatcaagaagctctttcccaaccaaaggccggccgtctatcgtcaaataatcatctactaaagatgccgtaacccccacattacctccacctgtattcaaataacgagtgacactattgcccacctgatctccatcatacatcttaaaccaaagaatttcaggattagcagtcagatcaggagtttcaaaaatgctcctataatcattctccacatttccggtattatatattttccatactccccgttgacgcacttcttcagcagcagcgatagactgatccaaatagttgtctatctttgccattaactctgcctctccaagttccgtatcataaaacttttcgggtttgtttttttccttagcataatgccatttttcccatgtagcctcaaagagagcgacttcactcttcaacgcacgggctacatccttgtgcagacgcatggatgacgaattattctgctccttcatcagtgaaatggccatatccaaatctgccaaaatcttatcggcaataaatgtacggctctcgcgaggcaacatcattacttccagatttggttctagcggggtgtctacccatgccaaccgaccatagtctgaaaacatggaataataaaaccaagcacggaaataataggcctcacccatcagatgattatactctacactgcctttttccggacagtcaccggcattatttatcaaaaaattaatgttacgaatatgtgtataattatctaaagccaccgcattgctcaacgaagttaatcccatcaggcgcgaattgacagcagcagatgccaaattatcactgttaacatcattaccggcaataccacctccaccaccagccatgaacccttgcgtacggacaccaaattcataatagcggtctatatagtttcttatttcgcctgtactgcgaaacggttcggccgtagacaatactccctcgggcattttatccaaatcatagcaagccgtaaaacagaatgccaaagccaaccccaataatatatttctttttttcataagatatcaaaattataaattaacaataaagcctaaggacaatacgcggttcatcggatagttctttcctccctcacttgtatatgagttggaactaaaaatggcttccggatcaaacatacctttcagtttggtaaatgtcaacagattctctccggaaaagaacacctgcactttctgcaagccagctttgtgtacccatgaattaggcaggtcatagcttaaagtcagattcttcaaccggcaataagctgcattctgcaaatacaaatcagtacgctgtatatttttatcctgataaggagctactccacccgcagaattaatataaggtttcggataataagctcccggattgtccggtctccaataatccatatgttccttgaaaacagtaacttgagcataaggtccaaatccccagaaatatgcgccaccggcaacccagtcacgtttgcccacaccttggaacataacactcagacttaatcctttccaactgatatatccattgaaagtgtactgataacgtggggttgtattaccaattatagtctggtctcccatatcaccatccaccagtctattgtctcccctgtcaatgactttattgccatccagatctatatacttcacatctcccggttcccacagttttccactgatatagcttaaatcatactccgcattgtaagcgtcagcttcttcttgtgtctgaatcagaccttcggcccgatatccccatatttcacctactttacggcctgtataccagcttccgtaaggatcattctttttagcattagcatattccgtcacttcggaaacagcatctgaaaccgaccctccgacactataatcaatatcgttacctatttttccacgataattcaaagacaactcccaaccacggttacgcatacgggcgttattagcctgtggagctaccgcaccaaacatatcgggaaactccagccccggtcccaacatatcttttgtatcacgctggaatatatctacggttccggtcaaagcgtttccaaagaaaccaaaatccaatccgatatttttgctttccaccttctcccaagtagtattcgggtcaataacaggagcgggattggtataaatatgacgaccgtcgctaaatatatatcctcccaaaccaccattcagtgacatattggaagcaaaagtatataaaccggcatctgcctgattacctaacaaaccatatgatacacgcaatttcaaattagaaaggaaatcggctgccggttccataaatttctcccgataaatattccatcccaaagatgcggaagggaagaatccccagcggtttcctttagcaaagcgagaagacccatcataacggccgttcaattccaacagatagcgaccgtcgtagtcataattgatacgcccaaaaaagcctcgtgtagcccatccgttacgagtatccactaccactttatcacctgtacccatacccaaattagggttgtttgtagaatacaagcctgtaatagagttcttcatatagctataatcattatcctcttcttgatacccccccattaatgtaaagttatgatgatcattcagagtgaactggtagtttgtataaagattgatagtctgataacgggtacgtccataagtacgtgtaaacttaccgtcttccactactcccaattcagaacgcgccactttggtcattgtcaccccatcttgctcataaatactgggagccacattcaatgcttcatactccaagttcatttgcttataagtataatcaaagaaaataaaccagtctttcagcggttgcaattcaaaacctgcagtgatattaaaacggtcacgttgcgtatctgtatacgttccactctgcaaataaggaatcatagacaattccgtaaaatgtccattagggtcaataaccgataccgtaggacggaaacgtgccaaactatgataaaatccttcactcaaaccaccgtcaagtccagttttcggatcttcattattaaaaggagtcctattatccgaatgcataaacttagtgttgaatttcagtttcaaccatttagtcaattctgaagtgatattggcattaaccgtatagcgtgtatagtccatatcagcatagcgcaaaataccgtcctcattataatagcctccggaaacataatattgtgctttcttgctacccccgctaaaactgagattgtggttatgcttaaagctataatttttatagtgcagatcaaaataatccgtatttcccaatccgcgttccgagttttcgaatgcggcattcaatgattcacccggtgccaaatctccccacgggtcaatactggacggatctctcatatattgttccaaatcagctattttttgctcactatacatacggttagcagctcctgtattgctgacaccgtcattccaaaacttcacaaagtcaagtgaattcaccatatccggcagcacagttggagcactccatcctaatgtaccttgataactggcacgcatctttccttcttcaccttgtttagttgtcaccagaatcacaccgtaagctgcacgtgctccataaatagcacaagccgccgcgtcttttaatacagaaatattctcgatgtcattcgggtttacatctgaaagagacatttccacaccatctaccaatacataaggagcagaatttccagacaagttgccttgaccacgcaaactcaacgaaccggtagcgccaggacgtcccgatcctccattgcttactgacaaacccggaactaaaccttgcaaactctgtgttgcatccactaccggacgatgttccaacgcatctcctttcacagaagcgacagatccggtaagattcacttttttctgcacaccataacctaccacaacaacttcatccaacgtttcggtatcctcagccaagacaatactgaaactagtttttccattgattggaagagtttgcgtagcataaccaatataagacacgactagatttcctttggatggaacattggaaagcataaaattaccatccaaatcggttatcgtaccgtttgaggttccttcaattaaaacactggccccaattacaggctcctgactgtttttgtcaattaccttaccactgatggataaggattgagctgtcaccatcggcgagaacaaaaacagaatagctgtcaccaatccaaggactgaaagcagtttcatttttttattcataataaaagaatttaaggattaattagattaaaaactgttgcaaatataggcgttcccattccgccagcacctctttatttgtctaattaatatctgtatttgtctagaaatcccctattatccagcctttaaacaaaataagacctgaagatctccggataccggaagacattcaggtcttatttttatatgttaaaaagaagttactctgccaccatactcatcgctattcctttttccaaaccacgaagctcggcaaggccacgcatacgtcccaaacaagaatagcccggatttgttttcttgttcaaatcatctatcatctgatgaccatgatccggacgcataggaatagatattccacgacgttgctgcactttcaacaggttcttaactacatgatacatgtccacatcaccctccagatgattcgcctcataaaagttcccttcagcatcacgttgggtactgcgcaaatgaacaaaattgatacggtctccccaacgttccatgatacccggcaaatcattctgtgcagatacgccaaatgagccacagcacagacaaagtccgtttgacggattaggtacagcttccaccaacagcttgaaatccgcctccgtactcataatgcgcggcaagcccagaatagacataggcggatcgtccggatgaataacgagctttactcccacttcatcggctaccggacaaatttctttcaagaagaaaatcaagttattgcggagtttgtccgcatcaatatccttgtaacggtccagttcattttggaattgctccaatgtaaaactttcctccgaaccgggcaatcctgcaatcatatttcgtgtcagacgatgaatttcttcctcatccatttgtgccagacgcgcttttgccttttctatctcttcggccgagtattccttttcggctcccggacgtttcaagatgaacagatcgaacgctacaaaagcagcccgctcaaaacgcaatgccttggaaccatcgggcaacgtatatgccaggtccgtacgggtccaatccaatacaggcatgaaattataagtcacaatatagataccacatgctgccagattacgcaaactctgtttatagttctcgatatatctcagataatctcctgtctgtgtcttaatatgttcgtgtacgggcacggattctacgacactccaagttaatcctgcttcttcaatcaatttcttgcgcttcattatttcctctaccgtccatacttcaccgttgggaatatgatgtaaggcattgacaataccggttgctccggcttgtttgatgtcccacaatgatacgggatcattcggtccgtaccagcgccatgtttgctcacataaaatcatatcaaataaaaaaattgagaattaaagactaaagacttgttacatggcaaatgcattgaagccaccatctactacggctactgtaccggttacaaagctgctggcatcgctgatgagatactggatggttccacacagttcctctgctttaccgaaacgtttgaacggagtctggcgaatcacatcattaccacgctgagtatatgtaccatcttcgtttgtcaacaaagtacggttctgttcggtcaggaagaatcccggagcaatggcattcacgcggatgccttcaccaaatttcgtagccacttcattggccatgaacgcagtgaaattagagattcccgcctttgcagccgcataaccacatacacgagtcatcggacggaatgccgccatagaagagaagttcacaatagcccctttcttctgttccaccatcggcttcaaaaatacctgtgtaggcagaacggttccggtaagattcagattaagcactttctgaaactcatcgactttcaaatcaaagaaatttcctgtaggagcaatcgtagcacccggcatattacctcctgctgcattcagcaatgcatctacacgaccatatgctgcgagaatatccttcagattctgctccaatatagcctcatccaacacattcgttacaagaaacatggcttccccgcctttggccttgatttcgtttacaatggcatttcctacttctgccttacggcctaatataacaaccttggcaccttcttctgccaaatgggcggcaatagcctttcccaaaacccctgttccaccggtgattaccaccacctggtcttttacactaaacaaattattcatgatattattctttatggtttatacctttaacactatctcgcaaaacaatcaggctctccggccccatattaaacaaaagatcggcgatactcaaattcggcagaaaaccgtatttggcatcaaaaacttgatagtaaggtttagggcaaaagtcagcatccgcctcacgccagtcacgcttcggatgaatagtctcacgaaaatcaacctcacccggaacaaattccatgcaatattccgttgttccttccatatggggatgaatatcgatcaaatcgcatactaaagaacaaatttcctgattataatcccacaagaaggcatatttcttttcataaaagacgtggaaatcatcagcatagtactcaaagaaaggactgtttctatatgcagccaccaaagcattccaatgtatatgacgccaattgccatgatccgaaatgcggacatccttcatcaggcatttaggtgtaccgcttttttccgtagggatagtcagtgccagcggaccgtcggctgccgcaatgacacaacggttgcgataagtctgtttcacataattgtcatactgttccacataggccttctcacaggcaaacagttttgtataatattccaccggggccagataggccgaacttaaatatatcgtattctccattattgcactcgttgaaaaatgcgcccttttctggatgaaaaccaaatgcgccaagctttaccgatcaaatggtcatcgggcaccaggccgaataaacgcgaatcacacagattcaccggattattggatgccatccagtaataatttttattaaatgtataggcttctacaggtttttcccctacatacagggtatctcccctgacagaagccactctcccttcatggcggacaatagtattgcacaacaaggtcacattccaaggatataccttgacaggtttccctttttccgggatcacaaagggatggctcttgcttatatccttatgataaagaggaatcaaatccacttttcccgccagtttttgttttaacaggtaatattcataatgactgaaggtacgtatatacttcccctcggcataccccaccaacctgtttccctgaatgttcacttgctgcatggcagcctgcatcgtttcttcttccgtatgagaatagacatacaaagatttactatccgggctcaacacttgttcgtcggtcacccacagttcatcattcaacatcaacgtatctccgggtactcctaccacacggcttataaacacttcccgattgcccaccgacgtctgaggagaccgtggattaggattgttgaacaacacaatatcccctttcccggcagtttttcccagccaccgccagatagaaaaaggcacacgaaacccataactccacttattcaccaaaaccctttccccttgataaaggctattctccataccggtagagggaatggtgcaggaggtgaaagcaaatgtctttaccaacagtaccagaatgacagcagtaagcattgcttttatccatacaggaatacagggtatgcgcaatttatttaatgttatctacaaaggtaaacaatcggttccaacgtatttttccatccagccagccacggtcattatccaatgacaaccagataaagataggttttcccaccacatgatcttcaggaacaaatccccaaaaacgggagtcagccgaattatgacggttatctcccatcatccagtaataatccatcttgaaagtatactcatcggtttccttgccgttaatataaatctttccatctttcaccgccagttcattaccctcgtaaacatgaataggacgctcataaacaggaagattctctatcgtgagtttcaccgtctctccctttttgggaatccatacaggtccgtagttatccgtagtccagttcttatacatattcagcgggtacaagccccccgcatcatcagccggtgtattctcaatactgactacaatatccttacgcgccaacaaaccagctttcgctttttccgtcagaggcatattataaacagaagcatccgtataatacatcatcatatcctccttgctgatacccagttcatgagccaggtcatcgggaatagggcgcttggttttcaccagataacgatactgcacattatcaggctctttattagctttaccatccaaataaataatacgatcctttatctccagcgtttgtccgggcaaacccacacaccgcttcacgtagttctcacggcggtctaccggacggctgattatctcaccgaagttctgtggattctctttcaggtactcccgtcccaactgataataataatcatagaccacccgttgctgctccggagtcatggaagccaaatccaccggttttgccagctccttgcctgcgccataactcagacggtaaatatcatcattgggcacaccggtggcaactgtatctccggccggaaagttaaagacaacgatatcattcaactgtacatcccccaaacctttcacccgtttataatcccattgtggatgctcaaggtatgatttacaattaaaaaacggcagtgtgtgttgtgccaacggcatgtgcagcggagtctgaggcacacggggcccataactcattttactcacaaacagataatcacccgtcagcaatgatttttccagcgaagaagaaggaatcacatagttctggaagaaatagaggttgacaaagtataccgccaccagtgcgaatacaatagcatccacccatcccatgacagtcactacatgacggttcttggactctctccaccaagtccatggaatcttctttgtgatatacgcatcgaagataaacggtacaaccaccaatcccagccagcttctcaaccagacaagaaatatcaggtaaagcgccagaacaacggcaaacttaatccactgtgtacgtgttgctcttatcatatcttaaaactgaaataaatcactcattcctaataacccttcatgcctggatgtatattccgccgccaaaacagctcccaaggcaaaccccttccgattctttgcatcatgggtaattgagatgctgtccgcctcagagtcatagcggatagtatgaataccaaacacctccccttcacggatcgaatttacaggaaactcattctcggcacattccgatgttcccgacacggttccatccggtgccaccatggtccctttcacccatttactcttgcggttcatattttccagaattccttcggccagcgtgatggctgttccgctgggcgcatccagtttatgaatatgatgagtttcggtcatggaaacctcgtaagcgggaaagttattcattattttagccaaatatttatttacagcagagaatatagcgacacccagactgaagttagacgaccagaacaaggtttttccacctttcgtgcataattctttcacctcatcaccatgtttgtccatccatccggtactgcccgataccaatttgacaccggcagcaaaagttttcatatagttgtcatatgccaccatcgggttagtaaactcaatagccacatctgctgatttaaatgcttccgaattaaaatcatcttgattatcaacatctataatactcacaatctcatgtccgcgggcaactgcaaccttttcaatctccttgcccatctttccgtatcctattaatgctattttcataattacgaatgttatttcagccacaaagatagcgtttttcgttgtaaaccattacatttgccaaacatttacacctcattaacatggaacaactattacactatgtatggaaacataaaatatttcctctcaaagaactgaaaacgacaaccggccaacaagtggaagttatagatacgggactggcgaataccgacgccggtcccgatttttttaatgccaagctcaagctggacggtgtgctttggataggcaatatcgagatacatgaaagatcttcagactggttcaaacacggacatcatgcagatgccggttacaactctgtcattctgcatatagcctccgaaatagatacggaaatcagcaggagcaatggagaaagaatcccccaaatacaactcatctgcccggaagcggtccgcaccaactacaaggaactgttggaaacagacagctaccccccttgttaccgcatcattccttcactcccccctttcaccgcccactcatggatgactgccttacagatggaaagattcgagcaaaaagcgaccttattgaatgaacggttaaaacgttgtcaaggcaattgggaagatgctttttttatcacactggcacgtaatttcggtttcgggctgaacggagacgctttcgaaacctgggctcatcggcttcccttccgggcggtagacaagcatcggaacgaccttttccagatagaagccatcttctttggacaagccggcattctggaagattctgatggagacggatactatctccggctaaaaaaagagtacacctatctacagcataaattcggacttatcccgatggatgcttccctatggcgttttctccggctacgtcctgctaattttccgcatatacggattgcacagttggcatgtctttatcatcgtgcctacggactgctctctcgcatcatggaaacggagacactacaaggtgtcagagatattctgaaaggaggaacgtcagaatactggctcactcattatacatttggcggttcttccccttcccgtccgaagactctaagtaacacctcactggatttactcattatcaacacggtagtgacatttctctatgcttacggactgcataaagggaatcgtgtactttgtgcacgtgccggcagttttctggaagaattgaaagcggagaacaattatatcacccgcatgtgggaacaatgcggaatgaaagcctccaatgccgccgacagccaagctttgatacaattaaagaaagaatattgcgataagaaaaaatgcctgtattgccggatagggtacgaatatctgaaacggtcataatattctatcaccctgccggccattattaactatatccatagaatgccgacagggatgtatgaagctgtgacaataatttatgtataacaaatgacgaaacagtcttgtcaccggaaggacaggtactgagaatacctctatcctgcccaactgactattattctctttggaaatcagacggataatttacttcattaataatctttcctccctccaaacgctcccatgtcttgaaagagcgcactccttgtgtcagttcaatgacccgtgccccatttcctcccggaatatcgtgataaacggtattccctccggtaaaccgtccatagcacaacaaaatccctttccaatcaactacataatcattcacatggtcgtgccccacaaatgtagccattatgtctcctgcattcagcatagcagcatacaaacctgtattaatcaacggagcacaagccttttccttacgtgttcctatcaataacgcattttcatcttgcgccgcttcattatattccggaaaaggaatatgaaagaaagccaacgagggcagtggcttgccaccattacgttccgtatatcccacactgctctcaacataccaatttatctgatccggctttatccaatcatacccttttacctgtttcaaagacgaatacgcattgctatcgaagacataaagcacagctgcatccttctttccgtcttccgacttcaaaggaagtacataattagtaactcccgaaatccctgccgtggtagaggtcagattacccggcatatctttgatatattccagtaactcaatacgggtcatatcttgctcatcatcatggtttccccaagtcacggcaaaaggcaaacggcgggaaacaacaggttccaaagctttagacaatgcctcgctcgccggcttgccaaacaccaaatcacctgtataaatcaccaaatccggtttctcaacatccaagacctcattcattcgctccgccgcttcttccgaggcagagtctcccggtacccaatgaacatcagtgaactgaacaatcttaaacttcttgtctgcattgaatttcagcacattttgcgcgcttaccggcatcatccctacacaaagcagagccaacacaccacataatgtttttatctttttcatcatcctaaaaatttatttaaactgattactgcaaccaccaaggcttatccgaggttttatcacttccaccaaactgctcattcaaagcagcctccacatgagtggcattgttattatattcatcctgcggatacatccagcgataaggcagactaactcctgcggcacggcggaaatcgggataccccgtacgaagcgcctcatagtagggtagccatacacttccctgcaaaaatgtcggcaaatacttttgcataataatacgctctatcttctcatcagtagaaagggaagaggaataagccaccttgtcatttcgaaggtattctgccgctgcatcctgagtgagataatcagctaccgacacagcatatttctgataaaactcaaaagacgccttgacggccgattcataataaatcttgtcatctccctgaatccatcctcttactacagcctcagccaatataagctgctgttcaacgtaacctaacaagaccataggctcattggtcggagtctggtaataacggggagcaggcttggaacagtttccagccaccgccttatcattaaccaaactataaggaacagccggatcacccccgtcataagagctgaaatcattaatcgcttttccggctttttcagcattcggagtttgcgtggcaacagcaaataaacgcggatcctgccgtgtagccaatgcagcaatataagtggaatccataaaacgccccgaaccgaaatcgctgtcattaaaatacggataacggttatcctgctggtcaagatagatcaactgcccgttatccgacaagctttccattaaaggtccgtcggctacaatctttgaaaactccgatttaacatctatatcacctaccttctcttttcccgacaaagacatcaaaatacgtaagcggtaagcattaatcaattttctccaattaaccaagttgccattgtagataatatctcccgaaataatctcatcactgccttcaagcattttatcggcctcttccagttccttcaaaatgccggccagcacaacttcctgcgaatcgtatgccggctggtaattcgcatctgtttctgccttaagcgcatccgtatagggaatacttccaaagtccagagtcaactgatagaaataattggcacggaagaaatgagccaaagcctgataagcacttccttctccggcctcttctgacattttggtcacatcacgcaaattgctataataatcaaaatccccacgcgtccatttataaacctgatacttgctttctcccgaagtcagaatcagcatcttggctgcatggcaagcatccgaactggtttgattgaaagcactataagcaactccggtcaacaacagggaaggattggtagtagtggcattattaggatccacattcatctcttccaaatcaatgcaagcactcattgcaaaggatacggcaagaagagatgccatgtatttgatatacttcttcatcatattttgaataaacgttaaaatttaatgttagcactcactcctacataacgggccgacggatcctgcaaatctccatcactggcaccaaagtccggatccaaataaggagtctttttcagcacggccagattgtttccaaacactgtgacatccagcccttttataaactgtgactgaatgaacttagtcaaatcatacgtcactgcaacacgtctcagttttaggaaagaacggctgaacgtattagcaaacaactcgctttcttctgtacgcaccacggcacgataaggataattctgggcccaagtctgtatgtttaccgctgtttcattctttttatagacacgggtatcggaaacaatattcccattcacgtcataagtcacctcaccgcttactatattgacaccttcgggcacataaacaggcttgccaccattatcatattcttcctgacgatacatggtagatttgggatgctttcctccccaccacattttctgcgtggtagtagatatcaacgttcctccgatagctccgtccatatctatattgacagtaaaatcctttatcttgaaagtattctgcaatccgaaacgaacatcaggagactggtttcctactttggtcttaaaagcgctctgagtgggcaaacccgtattcgcatccaatatcaaccggccatccggtgtcttttcccactcggtagcatacatagcatcagcccggtcaccttttttcaaatcgccgaacttctcctggtctccataaatcccggtcagcttacgaatattactactccaattggtagctacattccaggtaaagtttttgttttttaccggagtggcggaaacaatcagctcgaaaccgtttgttgtgtattcgttaccattcacataacgtttggtaaatgccgaggcagatgatatgggcagttctataatactgttctcatccagcatatgatagtaggtcagatcaattccaatgcgattatgcaaaaacgaagtagaaacccccacctcatacgaggttgttttttgcggcaatatattcgcattgagtaacgtacccggataagtcacggacggaatactgccatacagtgtgccattggaataagtagcatacaaagaataaggatcaaggtcactggaaacttgcgcccatgcaccatttactttcagataatccatccatgaaggcagtttcacatattcattaaccaatgtacttaatgacacagaaggatagaaataggagttattcccttttgccaaagtagaagaccagtcattacgcccggtaaatgtaagaaacaaagactcaaacaaatctacattcacagaaccataaacactctcgatagctttttcgttcatcgagttggtagcgcttacaggattcaggctattacccaaattgtatactttcgccacgatcagtccgtctgtagactggctttgcttccgaatctgacggtaatacagtgaagtaccggcattgacagtcaacgtaaaattcctgctgaaagcacgtgtgtaagtagcaagaaaatccgcattgatgtccagctgatcagtattccacgttttgtagtcgccattccgcgaatcaccatagttcatataagacttaggaacagacatatcttcaaatgtgctttccaaacgtcccgcagcccgtccttgcaaactcagccccggtattacatcccagttcagtttcagttgtccattcattgtattacggtcatgcttttgcgtcagttcattggcagcaaagtaaggattattataccacgcatagttgtagttggcctgacgtgtaccttcagagtccggacgataataatgctcggccaactcctttccatttacatcatttcccatccataacaaaatggtatacatatgatttttcggtccatatccataacgtggataattgggagaatataccttgttataagaaagattggctgataaagtaaccgagttactaaggttatacatactgttaaagttcaatccccccgtataaaccgaagtattgggaacctgtccgcgctgattggagaaatcaccgttaaaattatagttagcttttttacttttgcttgccactgaaaaagtcgcttttgtaataattccggtacgtaaaaagtccctcaggttatcatgaggctcccatgcgatgggcacccgttcgtacttagactggtcatcataaatcgtaccggaaacatccccccaccaaggaatcgtttctcctgtttctttattacggataggactattccactgtgctattttctgcccggcaaaacgaggtccccaggtcatgtctccatccgagataccaccatctgctccatcccaaaaggcatactgaccattagagcccgaaccaaactctgtctgagtttcaggaaagaccgtaaatccggcagaaaccatactggacaatccggccgtaacagtcaatccatcctctttcgccagtttggtagtgatcaaaatagcaccgtctttaccccgcgaaccatacaaagcagcggcggcagttcccttcaaaacattaatactttctatattttcgggagatacgtcaaaaagatccgactccacaggcacaccgtcaatcaccatcaacggagtctttccacgtaaggaaaacgaaggagcctgaaaaataccggtaggattatttaccgtcaaaccggctacctgacccgacaaggcattaccaacattcaccgtacccggctggtctaaagcctcggtattgacttgttgggtagtatatcccaacttctttttctgctgcttgataccgatagcagttaccactacttcgtcaatggcctgcacatcgtcattcatcgtcacgttaatcaccgtttgtccatctacttgtttctctaccggagtatatccgatataagaaaaaatcaatacaccattggcgggcacttccactgaataacgcccatccatatctgtcaccgtacccactgttgagtttttaaccattacgctggcaccgataatcacatccgacttatcccgcaccacaccggtcactctgagattctgcgccttcacgcaaaggcatagcaaggtcataacaatgaccaagcactgtttagttttcatttatatataattgttagtttatcctgaaaagaaagaattcaatagatacttttaaggctgacacggcggaatacacccaacaaatgagatacgtcctttttattctcttgtaaagcagtctcaaaagactccgtatccgagtcgatagcggccaacgccactttcagcacccctgtaaactcctgctccgccttatcctgcggcagcaggtctttccttacctgacggttcagttctttttcaatggtacgtactgcattgtagatttccggcttacgaatcaccgtacgacgcgtcggatctccgggtaccacctcttccttcaccacataagtatctttaaatgaatcatacaggaaggctaccttcttacctaatttatgattagaaaccaatgcagccagctcttcggaagaaggggtttcaacagtagagtaaaactcccatgtttccaccttagccgaagatgcatccgttttcacattctcttttttatcacgtaccggataaaacggcatagcccacatctgttgggcaaacaaactgatactcaaaaaagcaacggttaaaatgaacttctttttcataattttaagtttattgttttctgccgcaaagaaacgaactgcacatttcaatccaaatacaaaaagatgaaactcacataacaattcaaaaaacagaaaggagataaaaaaagtgtgtggatatgccctgcacatccacacaccacctatgcttttattacaaaagaattacgcttagaaagccttcttgtaaagttccagaataatttcttccgtcacttcacgaggattgcccggcgtacacacatcggcaatagccgaagcggccagacggggcaagtcttcttccttaatacccagttcagacaaatgctgagggatacccaccttgacagacaatgccttcaccgcctcaacagcagccttcgcagcctcttcccggctcatgccatccttgtacacattcattgccttggcgatatctacatatttggacaaagcagccggagcattgaactccatgatgacaggcagcaacagtgcattagccacaccgtgaggaatatcgaagatagctcccaacggatgagccataccgtgaaccacgcccaagcctacattagagaacgccatacctgcaatgtactgtgccacggccataccgttacgggcttccgcattggtaggctcgaagacagcggtttccagataacgggcaatcatttcgatcgccttgatctcgaacatatcgctcatttcccaagcgcctttggttatcaacccttcgatggcgtgggtcagtgcgtccaaaccggtagaagcagtcagccctttaggcagagtgtacatcagttccgcatccacaatagcgatggcgggaatatcgttcgggtctacacaaaccatcttcttatggttttcctcatccgtgatgacatagttgatagtcacctcggcggcagtaccggcggtagtgggcagtgcaatgataggcactgactttttccttgtaggagccacaccttccagtgacaccacatcactgaagtctggattattagtgatgataccaatcgctttcgaagtatcgatagacgaaccgccgccgatagccagaataaagtccgctcctgattttgcaaaagcttcaactcccgcctttacattgcttacggtaggattcggtttgatttcactgaatatttcataaggaatacctgcattctccaagactttcaacactttatcagccacaccgaacttaatcaagtccttgtctgtagcaacaaacgccttatgcaagcccaaacgtttaatctcttgtggaagcacttcacgcgcacccggaccgaagtaagatacttcgttcaatacaaatctgttaatcatagtttttttaattatgtagtttggttgcaaacttagtacaaattcttgagaaaacggctctttaaaaagattcttatagtatgttttttggcattcatgcaccccgccttcagtccattcagcacggttaacacactgtcacacaaaaaataagactgacagaagccccttcagcctcctgtcagtcctttcagccggcctgatggacgggaattatgccgccagcaccaccttgtacagatttcctttctccgtatgcatccgttccgcccccatggcgctcatcatcttgccgaaacgcaccaccgtcatgccgcgcatagccgcaggataacggctctgcaaaatggtgaaaatgaccgaggccgaatagagtttgaactcctctcccgcctcaggcagacgaaaacaacggtagaacacctcctgctctacgggcatggcatagaactcgcggttgcgcaattgcagttccgcttcctcttcggccgaaaaccaataacgctcgccgccctccagctccgccttcaattgggcaaacaattgcttgtgctccagtggcgtgcagtctattttctctttcacctcggcacaaagataacggcgactgcccgtggggtcggtcagcaaatccttatgattactggttcctataaacgaagccatgcggggcaggtgactgtaggatgaacggtgcgacttacggaaatccaacttcttcatctgcatcagtgtcttgagcaacggcagtttttgaggagaaagacggtcgtactcatccagattaatcagcccgaactgcgccagtttctgttcgcagcccgactgccccgtcaactcaaaactgtccgtgtaataatctctcaacccgtcgggcatcaacaactgacaaaaagtagatttacacttgccctgcatacggctcaccaacataggggccactgcattggcgcaacggtccatgcgtcctgcccactgggcggccattcccagcatccagcggtggaagccgtttatccagaaggcttttttcgagatgcgctgcgccagcggagtgacgcggtccaccccgtcccattggggcagtgtatccatataagtaaggaaagggtgatagtcttccaagcgttccgaatggagcaggcggctcacatccttatcccagcaattgatgcgatgacggtgcgcttccaggcacaaggtgttcaaggtacgctgagtcactatcttataaggtgtgtccgtcccttgccccttcgcgcaatattcgggttgttccgtcaacacgttgaaacggaactcatagtgtttccacaagtagttctccagacggtcttgcacctcccggttatccgcagcctgttctttttcccttttatccgaagaagggtccgcctgtttcgccgttgcagtttcaccgttccataacttgcaccattccatcaccttccgaatcatttctttcatcatgattttattgtttttttagttgttgtttccacaaagatagcacattgaaaagcctttgtcaagggatttccggcgtttcgggatgaaaagtgactaagcgtaaacatccttatgtaaaagggttttcatcaggacaagttcgtgttctcttcttgacaagtacagtgtttcacttaagtgatgaagtttcatcacccaagtggtacaagctcatcactagggtgataaggtttcatcacttaagtgaaacgataaatttatcaggaagcaagtaagcattcggcctcgtgcgtgtttctctccaagttataataaagtcaaaagccagacgaagcatgtctggcttttgactttattatagctttcctgtttatcctttccaattaaatggcagtaaatcggtgtaatcgtttttctcttctctttctttctcctgtaccctaatcagcacgtcctgcatccatagttttgggttcaccttattttccctacagcatcccatcagtgaaaagaaaattgccgctgcatgtgctgcctcatgtgatccggagaagagcgtattttttctgtttaaagtcaacggccttatagaacgctccaccggattattgtcaatgcagaactgtgcgtcattgacatatccggacagttgttcaaagcgtgtgtacatatagaacatggccttggcaataggcgatttatcgaccgtatgtccatattcctccttgcaccatttttccagttctttgataatagggtacgatttttcccggcgaagctttaccaccgcctccccttccagatgttccattctgattttctcctccacggcatacagtccgcctatttttccaagtgcatgccttgctctgggagggtcatttccttccgcttccacaaagttgcgcctgacgtgcgcccagcagcacagatgcaactttccgggtagcgtgtcgaacttgtcatatactgcaaagccgtcactctgtaccacccggacctgtcctgccagcagtgtgtctattccgctgctgccacggcccttgtgatattcaaagaagggggtatggaaccggggcagatagaagttccacatatacccgcggtgaagagcaccgggccggtcgctttcaagtacgggatggggtgtctcatcggccatgacgtaatagctgtccttgaccagttcacgaagttcattatagattggttccagacgctgtgcggcagccatcatccagttacttacggtggaaggactcagatggattccttcacgctcaaagatatccagctgtctgtgcagaggcaggtggtcgtaatatttggcggtagcaatgtgggccagtacactttccgaggcattgctgtggggatgtgccattacgggcatgggagcggttatgatacgaccgtcggcgagccggtatttaggacggatgatgcgtttcacatagaatcgggcgggactgacagcatactgttcgctcacttcctctcccagcttcgtcgctccctccaacgaaaggccttccggcatgggaatgataatctcctcacggggaagggacgggtcgatgggcttacgggcgtggggagtgatctttttcgtgaagcttttacggaaacgattgtagccattctccgatgtgacggatttcccagcggttttctgttcttccgctaccgggtcattgacatcggacggagactcgaaacagatgctcagctggccggcatcttcgggaagatgacgtttttcactggatttaccccataaacggcgtgtcaagtcagccaatttccatctcagatcggcaatgacggctgtacaggccgagatttcttcgacctggcgggaatactcctgcaaagaggcttcgtattttctctgaagttccgcatgctccttttcaaggcattcatgttccttgcgcaactcttcgtactcttccaaagtaagggtaataaccggttctttcactgtacatccactttttattatgtggcaaagttatcaaaataaaactgcacggcttatagaatggggaattacttttcaactgttttccgatactttttaacagtaagcagctcattcaggcgattccaggaaatttgaagaaaatccttcttccgttcctcctttttcaagaggaaagaaccgcgattcagacgacggcattccagacggtattcgtcgtcgcaccgataaaggatatgcaacctgctacgggagcggtcgggaaaaatatgacagctctgctctgacacgcaggaacccgtgtgtcggatgacctcgccacaaagaccgtcaatacctttatggaaattacaaccttggggataaaggtaataagaccaaaaaggactgctgcggaaaaggccaagacctaaagggagaagtaggtcctgaggggaatggataccaaggctggaagacgaaactttataacgacggccgccatcaaatatgaaaagaacagaatcaaaatggttagactcggaaaagagagtacgtagtttatcactttcgctagaaaattctaatactgaacacataatggattaagattataatgaagccacaaaggtaggaaggaaaagagggggaaaaaacacgcacgaggccgaatgcttacgggagtaataaagaattttctttcaaacgcataacttaccttgaacatcttctttctattaaaaactttatttcctttgttccttcaggaagaatagactatctttgttgtattggcatccggatacgaactaaagacaacagaagcaatgatggaaaatataaaagaaatcccctatggcattgccaacttcgtggaagtggcagagcagaacatgtactatgtagataaaaccatgtatctgcctttgctggaaaaacagccccggaacctgttctttatccgtccccgccgcttcggcaagagtatctttttgagtatgctgcgtgcgtattatgacatagcacaaaaagaaaagttccagaaacgcttcggcaatctatggataggcagccgccccacccccctgcaaggaaaatttcaggtggtgtatcttgatttctcgcgcgccagtggcggaagcggttcactggaagaaaatttcaataactattgcggcatggtgatggacctgttcggcaaagtgtatgagccttattattttcccggatttgcacaaaagatggaagaacagcccgactttgtcagcaagttgaactacctgaacctgcatgcggctgaatccggaatgagactttacctcatcatcgacgaatacgataactttaccaacatcgttctgaacgagcagggaaaagacatttatcatgccctgacccatgccagcggattctaccgtgaaatattcaagaaattcaaaggcatgttcgagcgcatcttcatgaccggcgtcagccccgtcaccttggacgacctgaccagcggattcaacatcggctggaatatcagtaccgactaccagttcaacatgatgctgggattcagcgaaacggacgtgcgcaccatgttccaatattataaggatgccggacagctcccgatcgacgcggacatcgaagcaatgatccgggagatgaaaccgtggtataataattactgtttcgcagaagaaagcctggaacgcgacccgaaaatgttcaattgcgacatggtactttactacctgcgcaattacatcacgctgggcaaatctcctaaagagatgatagatcccaacacccgtacggactacaacaaaatgaagaaactaatccagctggacaagctggacggcaaccgcaagggcgtattacgtaaaatcaccgaagaagggcaaattatcaccaacctgatcaccaccttcccggccaaggaaatcgccaaacccgaaatcttccccagcctgctcttctattatggcatgttgaccatcactgccacacgcggcagccgcttggtattgagtatccccaactataatgtgcgcaaacagtattacgaattcatgctggaggagtaccaggacaaacgccatatcaacctaaacaatttgatggacctgttcgatgaaatggcttacgaaggccattggcgcgaaacactggaattcattgcccatgcctacaaggaaaattcatctgtacgcagtgccatggaaggcgagcgaaatatacagggtttcttcaccgcctacctcagcgtaaacgcttattacctgatggctccggaaatggaactgagccacggttactgcgacctcttcctcatgccggacctgatgcgctacgaggtgaagcatagctatattcttgaactgaaatatctgtcggtgaaggacacggaagagaaagcccggacgcaatggcaggaagcggtgaaacagattaacgaatatgctgccgcaccccgggtatggcagttggtgcagaacacgaagctgcactgtattatcatacagttccggggatgggagctggagcggatggaagaagtgtaggcctgttcaaaacaacatgacagtacggatgaaaattcatacaggaagtcaattcacattcagaatcactcttttataagactttagattaggcgttccattatctgtaagttcaagtatcaaatgtaactgtttgcccggattatccggtacaattatctccgtcctcttctcatcgacgtgctttatagccacctttgtttgcacactgcctgcttcccgatattgccaccattggtaagacaatgaatttttatcagggtcaaatgaaggagaggcatccagtattattttttctcccggccggactgtgcgtacactttctcccaatatccgggcaacaggttgatgatttgcctttgaatattcatcagccacgcaccagtcggcacgagccgcccagtcattttgtatagcaggcaaccaacgctggaaagtataatgcgaatccggcacaccgtttttcaaatcattcccatcttgcatgtgattgccatttttatactccgggcgtcctccccatcctcctaatgtatagtctgtatgctgttcaagtccattacgtataagaggcataaaagaaggagtatccccctcactggtatattcctgaggataggcggcacacagtggtccgtgcccattcttaatatggtcagccaaccaaggtttatccatgatctgttgcaactcttttgaatttttactaagtctgttcttaaaataataatccacactcatgtaatcccatacatatctccatcatgatccggtgcgcccgattcataaataatgatttcaggaagattctgttctatccattttccaccgccgtcctgataccaaatacaatataatctggcttttgataccgcttttgcccattctgcagcagaatatttctgcttgatctgccataaggcattggcctgggtgttggctccaccccatgctaaaatatgaacaggcctcggatcagaatcaagcaatgtccttatgatgagctgtgccccctcgctatcagacagtaaaggaggcaatttatgcaagtcctctctgttctcattaccaaccgccaagacacttagcaaatattcagcatcgggataatcgggattatgtttcctcaaattaggcagacattccgcatatttggcaatttgtgattcgatccatttatctttactatgtccgtctttctgtaccccattgacttgaacaatgcctgcgacatcataatcagaagaatacataagaaaacgaatcatagaactttgatcgtcaatctcaccatccgtagtgacaataacccggggcttctcctgctgtcgggcaacagcagataacattgacacaaacaaaaaaacaatacagcataaaacagggggcattttcatattacaaactgttaaattagtaggccaacacattccaaagatctctgatacgttgttcggggtcccatttgccattgaatgtccacttggcggtaacgccatgaaactccggagcattctccgcctccttcaaattatcgtttaaccagccactatgccctccttcacgggtacaaccataataataggtacgtagcccccacggacagggatcaagcactttatccgaataagcataatgaatattcccgtcaagcacattcttcgacattttacatttgatgagataaaactgggaatcatgatgatagcgtcctaaaagtgtcggtgtcttagcatcaaatgaagaattggtaataaccagtttcttgttcttgtcacctcgtccgtcatgccaaatcatggcacggctatcaccataaaaatggcagcgtgtggcatagcaccatccgcgaggacaaagaaaatccacacccggacaacgaagatagagatcggcatgataatacataccattgcttccgggcgcccacaaggaaagggcatcgtttccatcggcccatacattactgttgatgatgatggtacgagtggcacgtccaaaaatcgccatctgatggatggtcgtattttcaacggcagttccgtaattgttgtaaacagtcagtccgctaataacacaatcatccgcaccttcctgcaacacaatgacaccattgcctaccggacgtccatgatattccgtgatggcacgtgtctgggctgtttcagccaagacaatccgcgtactgtcacggttttcccccaccaaaacaatattaggcctgtcaataatcactttttgatgatacgttccgttcaacaataagattttaaaaggtactgtcggaatttccggagccttttcaatagctgcctgaatactctctcccggctttaccaccacatcaaaagccgtacgctctgccatgggacgacgatacatttcaataagcccgttttcattcgctcctttggttgccagactgattgccactttatgcttcggatcatatttgtccgcccatgcattgtatatggcaaaaagctcagccggtctgctattgtaccaactatatccgttacgacgttctgttcctatttcttccaaatggcgacgtggcagcccatcacggtcacatacatacggttcacaatatttcaaatcataataacgcgcccaaataggcttggcttgaggatcttccacaagacgagtatcccgctcaccatttgccagcacgatacgctcgcatttcaaaccggtaagtttatacctgtcaaaccatttcatggctccgtgaaccgcccgcttcacacgtgcgtcgggtgcaggtaattccatgagcagacgcacaattccggcactctccgccgaacaataagacggcaactcatatgcacgtgccggtgcaggcttcaatgtttccctatcattctgctgacaccacacagaaggttctccatcctttataatttgtgtagccagtatacactctattcctttattaaaggcttttcccaaacgtacacacaaagtcttgtctatcaaatcatcctcataaggcgctttgtgattcatcatatcacgtatcatattcaatgtattgacaatggcatcgtcattaaaagtaatatgtacctgataaccacgcggaccgggccagaattgcggccatcctccgttttcgtattgaccactcagcaaatattccactccctggaggaaagcatcccgataacgtatatccttagtctgcctataaagacgggctaaaaaaatcatctgggcagttgtggcattattatctatcgtagaatcatcacgacgtgatttatcctttatcactttagccagctctttatcattcatgcggcgggccatatctatattcttcggccaaccgcccgtacagcgttgaaaagccaatacattttcagcaatccgccgagcttcatctgtcagaaagaaagaatcctgctccatacgtgctatttgtttccattccttaggatacgactcattatcctttttatgagctctttgctgcgcaaaggagccggttgccatggcaaaagccataaagccaataaacacttttttgaatgtatttttcattattcctatatgttttgataaaaaccagcaaacaaaattatgcgttttccaatctgaatacagagaatatttggtctttttcaggcagattttgcacagacatcatcaaacctatacaatttttgatactctgcccctttacctatacataaaaaagcctatctatcacagatcggcttttctatcaaatatctgtctttcaaaatccaaagattctcagaagacattcacattataataactataaaacttatcaaaccccattctactatctagcagaaccattacgccatttagccgcaccaatgttcaactgataaatttttgactccataactttacctgtctgattgtaatacaagtttacaccatgctctccagccgtaccatcaagtgcatctgcacgatgcatatattgatcgttatcagcagtagccttatgtggtggatttggacttaccatcagttctaatggagaaatatcatcaacaaaaacttccaatgttccatttaaagtagcagaaccattgttgaccaaggtgccaaaattatttttagtcgcagtccatggattattgctaaaaatttgtccgttggataaaaaagtatttgtagaataattattgtcaaaattcaatgtcacatgtccggctgtaccgtctgccatagtcattgtcttacggatatcagctcctgccatagtcatctttcggacatcaccgtcctgcttggtcaaaacaatcaggttatttttcaccgtataagtacttccatctggaatattacgcatattgaaaatatttcctgccgcacgagtgttccagttaaccaaagtattgttttcaaacgttatattccatgcccctcccttccatgcactctgcttggtttcactgaaaaatgaagggaacggacaatcatagaaagtgtttccacgaaccacaaagtccttatataaattagaattcgcattattcccggaaccggcaatccatggataacctccggcaccattactataatagccacagtcaaagaactggttatcctctatcaagacatgatcccaaattttgtaattaggcccctgctcacgaatgaacccacgtaccagacgcttgaaagtacaatttttcaccacaaaactttccaaatgtacagccataccattagaaaacatattaatgaaataattacctgtagccgaacccaaaccggcaacattatcaccataagtaagagccattggacaatcgaaatcaatatcataaaattcgagcatcttcatataaatttctcctccttctccagcttgtggctggcgcccgaacatcaaattcatagaattaacattagtacctgtcatatgcataccacctaacaatactttagcacgtttacctgctgctacatcctcaggacgagtacgaagaacaaaacctttgcaggtagttaaattatcaaacatacaataagtctttccaccttccaaataataagtctgtccttcggctaaatttacatcggaaatgaagtctgttaaaaggaaatcaatacgcattgcattgtatttcagagcagcctcgtgctgtatcaaagcattttgataagcttcatctgaatcaaaccggtcacgacttggagcacttaagtcatgagttactaaaataggctctcccggttctccgtctgagcgggcagaacaagtattgtaatatgcatcccattttaccttcacattctcgttgcgaacattaatcacataaacagagtttttctgaagtccgtcaatatctacatatcccttttcaaaatcctcatcggttaatttatattttctccatttttcattcactgttgattcaggattattaggagacggatctacttccaaccactgataaacaaaattatcgttagcatcaagctgaaatttttcacgataaatagccttatcatcgtctgataccccttctgttacagttttgaaagcacgattcaacatcacacgcatagtagtctgtgtagtcttagaagcatctacatagacacagaatggagttgcatatcgatcagaagtggtaatgcccatccattctgcccactgtctgccatcaccatgtccataccatttggatgcatgtgaaaaatcagtcacattatcatcttttgttgataacacgcgaatagcaaaacgataatcagtggaatactgttgatctttaataactaaatcaaggacctccggtcctacaatggtatctagtaacaaaagaccgttttcggcagatgtaccccaagcatctgcaccacccgaaacatttggctgtagtgcctgacgaatctggtagcccgcacagttattcactccataccaataaagatgaatatcattgccattcggtccctctgctttacaattataagcatagtcatccccttttcctctattattatcacaaatgaacatagtcatccattctctatctatatttgccattcctttctcatcatcagaacacgaaatacatgagaaacctgaaaataacattaatgcatataaaaatatttttttcatcattctgtccttttataaattatttatagccataatagttcttgtatacacctgctgagcgttggatagccgcattaggataaggtaaaatataacgtacaggaggtaaatcattcacctcaggaacagaattaccatccagtggtgattctgttccatctttgaccaacacaatcattccttgttctgtatgacgaatatatccatagaatgaatatttacattggttagtaggctccgaatcattgctccactgataaaattccgccatcttccaagttgctccatcaacagctaccaaagctgtcgctggttgattagctgatttgtaaggattataaatatagagcatatccaatatcttattgggataaggatagccataaacttgatttacatccacacgccattcaaccgtttgtggaagaacatggtaatacatagattcgggaagatcatccaaataagcactaccatcatgttcagctatatcatcttcgaagccagtagaagaaccggcattagacattcctacagaaagatagcgcaaaaaactataaacaatttcctgtccataaagattattacggacaagatctctccagcgcatattctcacccgcaaactcccatttacgttcatcaagcacggctttcaaaaaagtttctttagaagaagccacctgagcaatataggcagaaacaacactttggtcatcgaatgcccgtgcatggacttgacgaagtgactcctgagcagtggcagtaggtccttccaactcattaacagcttcggcattcatcaacaaaacatccgtataacgcatataagggaagttaatacctgtattactggcactcaaattggtaaactgtcccgcattcgcccataatttagaccatttattattatggacagtataatccgcacgaatcatacaagaatcctgagtagcattattagcactgttaccataataccaaagtccattaataaaatctcgacgcttatcattctcatcgaatgaataacggtaaaaagcactcaaacgtatatcacctttagattctccccatacattcttacccaatgtctttccttcattaacggttgatgtaggtccttgggaataccctgtattacctgtagactccttagcaaaaggaatctcaaaaataggatcacctttagcaataatttcaaaattgctttccttggtaaaaatatcttgataagaagtgcctacagagtgtgtccccgaagcaataaccaggctagtatattcttttacgatttgataatacttctgataatcttccggacgtttcatcacaccataactatttgcattatttttatccggatgaagtgaataacctccggcagtcaatgcaatacgtgcaattaatgcccaagcaaactccttagacgcacgttctactgttgttgttgtagtagaagacatcttaggagcaatatcctgcaaatcttcaataagtttattttggatttcttcgcgattcattacaggaatcacataattatcacctaattgtgaggctggcaggaaagtgaaaggaatatccccgaacatcactaccagatcatgataaaccatagcacgaagacacttggcttcgcccaacatctgcataacagcggtattctcttcattataaagcggaccagtttctacaccccggataaaacggttagcatcttcaatagctttataagaagctctccaatatttatcaatttcgccaccttgatcgtcacaatcaaaacgtgcatagctattatgggttgctacattacctgtatacatctgcatatcaacatcactgttcaaattaaaagttttctgataggcactgccataaagatcacctaccaagatagaagcataaacaccgttcaacgcacggctaatttctgtttcttggctgaacacaaagtcctcattgtaacttgatggagaatccacgtcaaggaaatcattgcatgatattagagtcaaagttgctaatcctattattaaagtattttttaatttcatgtgctttcaaatttagaatgtaatattagtacctagtacaaaactgcgactacgtgggtaacggttatagtccataccacaagttaatcctgtctgaatatccacttcaggatcataacccgaatacccagtaataataaacaaattagaggctgacacataaaaacgagctttcgaaatcccccatttagaagtcagatttccaggtaacgtatagccaacagtcaaatcctgacaacgcagaaacgatccatcctcgataaaataggaatgagttattttttttgtcacatccgtcggattccaaagtgtcctaccttcgtttaattcacggtacatatccaacgaaccatcaatatagtaacatttgtacaagcattcgccatcaccatcacgggtataacgccaacctttgtcggcaaatgtggaaagcacattgtagaacttattcttattgctttcggatgaggaaagctggtaagctgtcgcattattcacatcaaaatcaagcataaagttgaagttcatggcaaaatcaaaacccttccattgtccgcttaatccaaaacctccctgcacttttggattggtattacctataacagtacggtcatcttctgtgatatatccgtcaccattcaaatccttgaacttgactttgcccggcagagtagctatgcctgaattagaatctcctgaaatctgattgattattgtttttggatgttccacaccgtctgcatccataataggtgcatctttcgaagttccgttttcagcggccgttgatccccaaggtactgcttgcaagttattagtgggatcaaaatagaattcatccattgaatataaaccatcatatacaaaaccataaataagtcctacttggtcacccaccttcaaacaataatcattgtaacttgatttccaacggttattctgatcccaaatcacattgtctgtaccatttaatttatcaactttcattttattcatacctaaagaaagatttgcggaaagcacataatccctgccactgagaatatctcctgatatagttaattcaacccctttattagttacttgtccaatattttgcatctgacttacataaccagttgctgaaggaatgtccgatttataaagtaaatctttcgtcgtattccaataaatctccggagtaacagtgagacgaccattaaaaagcgtgatatcagcagcaagattacgagttaatgtagtttcccatttaatatttttattggcaaaagtagtacccccttgattaccataccattgctctccaaactgagttgcttctccaaatccaggtccgccggtagaattaacagtatataaataacgccacatatcatcactgatacgattatttcctgccaaccctatagctgcacgaagttttaactgatcaatccattttatatcttccataaacttttcttctgaaagcacccaagcacctgatactgaagggaaatatccccattgattacctggagcaaatttagtggaaccatcagcacgcatagttacagagagtaagtatttgtggttatagttataacttgcctgcccaaagaaagaagcagtgcgatctggagtcgaaagtgatgaagttgactcctgcggtgtaccgaatcccatattatcccaagcctgtccagcctcaaatgcacgtgggaaataacgattcttttggaagttcttcttattttggctatgataaatttcttgccccaataacatggaaaaattatgcttatctttaatagaaaagccataagatgccgtgttagtccaaatatatttaaaagactgatctttctgaatacttgctacaggcaacgaattattttttgtaccttcacctgtcaaggcaccccaaaaacgatattgatctttccagtttaaactaagagtggcttctgtacgaagcaccaatcctttaacaggcttccattccaatgaaatagcattagtatagttataagcatacttattctgttgattaatggcaatatcacttttcggattagtataagtaaacaatgcttcttcatcagggtcagcataagaaggatctatatatccgaattcacgtaatccgttagtgggtctataacggagtacatcaataataccgcctgtaccaatattatcacctccagctccttgatcacggcgaaacgtaaatttaggattgatatgcaatgtcaaatttttagttatatcaatagctgtcttgatattcaaattggtacggcgcacacccgaccccataataatacctttatcttcgctttgagtaagagaagcagtgaagcgcatcttatctgtacctccaccaatagttacattagtagaataattgataggattctctcccattacctcatcctgccagtcatgagtaggcaaagaataatacatatccaaatcttgcggattgccaaaattagcacggaaaaatttggcattgctagaacggctaccattacacgccgaccattcatattgataacgtgcaaactctgctgaattcattaaatctaattttttagacaaatgactagtagacaaatgggcattgaaacttacctgtatttttccagctttggccgatttagtagtaacaaccactacaccattaccgcccttagctccatagattgccgtgatagaagcatctttcaatacatcaatagaagcaatgtctgtaggaggaatatcattgatgttatccacctgaaaaccatcgacaatgtaaagaggatcattgctctgggtcacagacgtacctccacgaacacgaatgttaatatctgcccctggagcaccatcgaccgtagttacttgcacaccagctatttttccctgcaaagccacagcggctgaagtaactggtacagcagcaatcttcacaccagacacggaacctactgagccagtcagatctttacgagctctgctactgtaacccagcactactacctcttcaagcgcttgtgaatcatcttgcagcgtaattgtcagttcttttccggtaaccgcatccacttcttgcgtttcgtaacctacaaaagaaataacaattctttttcctttagacacggccaaagtaaactttccgtcaaaatcagttatggttccgttggaaggatttcccttctccacaacggaagctccaataacggcttcacctgccgaatcaagtacagtaccttttacggtaatgctctgagcaaacatcatcaccggtatcagtaacagcactgaaaacagaagaagtctgcttttcactcctcttaattcatttgtaaatttcataataaaatattaagttaaacaaaaatttaaagtccattttttccgtgaatgtgaaataatataaatcactattgttatttatattctattctaaaagtaaacaattataatttttatgagaataatagatacttattaaaatagcacacgcattcttataatttccgtgtacgcacacaaaacgagtgaaaaatattagatatacaaattcccatgctaaataaagcacatcatcaaatacattaacagtaatgttttccattataatttaatgttagtattagaaaattggtttatttttatactatatacgccacaaataaaaataatattgttgactgaacctaatttttgtattgaaaaaaattagttcaaccaataattacaacataatgaacaaaaaagacacattcatcaatgaaaacacggaattacataaaaaagcagtgctatggacttgtcctccataacactgccacctctatttatcataactgacaaactcctacagctacaaacctcactcctcctattttatctcatcccacttcggtggattcacctgcatcaaatgacggacaaagaaatcataccgcttatgttcgccaaaatcttcccccattgtatgatgcgctccgggaatcacgaccaattcaaaatctttattcgcctttatcaatgcattgaccacctgcatggtagaggcaggatctacattatcatccagttctcccaccactaacatcaaaggacgactcaacagatgtgcattttccacattagacccttccttatattgatctcctaccggatagcccaaccaaagttcattccaccaaatcttatccatacggttatcatgacaaccacaagccgaataagccgctttatagaaatcaggataaagcaaaactgcatttgtagattcctgaccaccggcagaacaaccgtaaatacctaccctgtccacatccatataaggatatttccgtgcagccgccttaatccaagcaatatggtccggcagaccggcatctttcaaattcttataacatacattctcaaaagcacgcgaacggaaagaagttcccattccatcgaccattacgacgataaaaccaagttcggccaaggaagtcatattccagtcataaggacggaaagtcttcggaacatactggtctccgggaccctgataaatgtattcgataaccggatatttcttgttcgggtcaaagttggtggggcgggcaatcaatccccacatatccgtcttgccgtcccgccctttggcaacaaacacctccggagctttccagccttcggcctccaaaagagttatatcggctgtttccaacggcatcaccactttgccatccctggcactacgtaacacagcgacgggaaccttgtccaccatagaataaacatctaccaaatacttcatatctcccgaaaaccaggcacggtgcatcccttcttcgggagtaagacaggtaagacctttgccatcaaaaccgatgcggtaataacggatgagataggggtcttcaccggcttccataccatttgccgagaaatagatctgacggttatcctcatctacccgaagcacttcgcgtacataccactctcctttagtaatttgataatcgggctgtgcggtaatacggttgtacatataaagatgattccaattgtcacgctcactcatccatatcatctgcttgccgtcttttaagtcatgacggaaatgacgggtataattcacatatgtatcgctggtttcttctaccaacgggcgcacttttcccgtttcggcagaaagttcaagtactctgtacacctgatgtccgcgctggttatattcaaaagtcacggcacggctgtcgggattccattcgggaccatatacttcatattgccggtcgaacaattcggtagaaggaataatgcttcgtccgctttccacttcatagatgcagggcactttaaaaggaagttcgtctcccggcttcgcatactcctgtttgtgaagcttgggctgaagctggtcagccggagaagattccacataataaacatagcgcttttccaccggacggatcttgcaggaagccaccttcttactgtccggtgaccagcggatgtaggctgaataataattacccagtgtcccgtccaagctcagttgcttttcttttccggtagccacctcctttacatagatattctgatttttaataaatgcgatccatttaccatcaggagacggaaccggtgatgccgtcttctcatcatccacctccatccaatgcttttgcctgataaggaggggaaccgcaccttcattgaccagctgatttttccgggacgcatacatccaacgttgattattaaacacaaagcgcagcgtatccaatcccttactgaccgacaaatgccccaatgcaagagcttccggcttgacctcttttccggatgcagcacccaacgcctttgccaaacgatgagaatcaaacaattcttttctagctttcttatccgcatctacagatacatacaggcggccgtccggcgtattccgcacataccagaattgatgcgtaccctctatccattgcggattgacattggaatagaaaactttatccgcactgaacttctctttcaatgcataagcacgccgataatcatcagccgtaccttgagcgacagccatgcccccactaaggaacatggctaccagccaacctaacttaccaaccttcattttgaattattctatttcacttcccattcaaacaaacccgatgaattatcggccggctgaacaatctccagttttaccgcttttgtctttaccgggtcaaaattgactgtattccccgtacctttttccactccatacttatccgctccactcaccggttgccactggccttgtgcatctttatagtacatcttccaactttgcggtatgcggcatcctccccaaggagcatcatcataccaatatacggtagcactggaaacagtcgcttcggacgggaactcgtaggatatccattcagtagttccctgtttgggccaccaatggtaatagggtacggaacggtcattctcatctttcggcaccagacggtcattaatggcggagatggatttcaccttatgcgaagcatccactttgctttccgatgccagcgtagcaggcatagtcggacgggaagcacttaattcctgaggcaaccacactgccatagcacctgcaccgcggtgtgcccaagcatagtaagggatcaacgtcagctttacatcagtagccgtcagacgacctctgtcgtcatagcccagaatctgcgcatccgtcttcaactggttaatgccatagagcaaatccggtttttcaaccacctcgaattgaggagtgcggttcataaacacgctcagcacatcaaaatcattatccggccattccgcacaataaacgatcgggccacgctccacggctatacgtccacgatctgcctccactttattattggctttcaccgtacgaggctccatatcgaaatgaacggctactttatctccttttttccaacggcggtctatgcagaaataaccgtccttcagttcactctgtaccggttctccatttactttcactgtatagctcaaacgctttccatccgaataagtgtacaggtcactgggaactacctgattacgcacccatcccggaatacggattttcattgtaaactgtccggcattgttcttgttgacaccgatagtgacatcaccgttccaaggataatgagtagcctgctccaaagaaacagccttgccctctaccttcaagttcgaagtattggacatgaacagattaacatacacgtccttacctttcaccgcatacacatatcccggcaaggaaggaatgaaacgacagatattggacggacaacaggcacagccgaaccaaggctggcgctggtgctgcccgatgctttccaacggattaggatagaagaacccgccaccatccagggacacgcccgaaataagaccattatataaagtacgttccagcacatcataatattttgcctcaccatgaagcaggaacaagcggtagttgacatacacattaccgatagccgcgcaagtctcgcaataagctgacatattgggcagttcatagttcttgccaaaagcctccccattgctggtggcgccgatgccgccggtaatataatatttcttgcccacaatgttgtcccaaatacggtctatggcatggatataagccgtatcccctgtcagtgcggccacatctgccatgcctgcatacatataagcggcacggacagcatgtcccacggcctcatcctgctccactaccggcttgtgcgcctgactgtattcatccgtacgggtagtatgtccgcgctggtccaaaaagaatttggcttgatccaaatatttctgttgccctgttaccaagcacagtttggcaagggccatttcggcaatctgatgtcccggcacacggatttgttgcccttcgcccgtacctatctcccggcatacacagtcggcataacggatagcgatatcaaggaaattacgttttccggtagcctggtaatgcgcaatagcaccttctaccatgtgtcccaaattataaaactcatgactcagttcctccaccttctcccaccgtttgcttcctgcccactcatgcggatgtttgggattcatggtacgcgaagtatagagataaccatccggttcctgtgccgcagcgacaataaccagcacactatcaatatacttagccagttttttgtccggataggtctgtaacagataactggcaccttctatcgttttgtacacatcagtatcgtcaaaagccagaccgcctactttaatggtatcactgggatgggcggcattgacaaagttagtataacgtcctgtttcctcacatttactgaacgccagaggaatcgttacttcacggctggcattcagccgttgcccccagaatgaatcggttactttcaccgaagtgaaaggtacggggtcgataggatagccgtgcgactgattttttacttgcgctgttccgcctgctacggtagcagtcaacagagcagtgactaaaagtttcttcatggttctatcatttaattgtttatcatagtttttgcaaaaatacatattccggtcataggaaaagggtgaatcactctttcaatggtagatattcatcccataatttcaatgagtgcagataaccggtaaagggccagtctccttcggcattgcgtcccaatgtgatgaattgtgacggtttcaccagcaactggatatctttctcactgactaattttccattgatataaacctgttccatccgcccatcaaagcagatatagatgtgctgccactttcctgccaattccttcatgtccttatatcctgcatcttcataccagccatagtgattgattactccacaacgaggctccgtgccgttgaccaacatgattttctccaattcatcatgcgaggtagtaaaatcggccacacattcattttcactaatggaatcattcagtacccacgcctccaaggtataaggagcattatcctgcaaagtggcaggaagcataaaactggaagtatagacctgagtaccctcaaaatgaaatgcctttttccctttcacttctttcacaacgagaggtaatttccgggcttcaaaatacccttttactcctcggttttccagataaggaaccgtatcgttcactacaaaatcatcggcagaaagactgaccaccagcccatgtttctgctgatcagctacaggcagacgcacgatatccgtttccgcatcgtatgccttttccgccgcttcctgtttccaattgtagtaacggaaattggtaatgaccaaaggttcggtggaactatgcagcgtaatcgctcctgatgaaagacacgaccccgcttcataactctgccatttacctgacctgtaaaccaacccactaacggtatgctctttggacgaggagagtaacggatgactatactccaatgtagttcccggttccagtaccaacgcatcacgcccaccgatgcgctgtatgcgtgccgaaccttccttcaaagtaaaagcccctcccagcatcccttcattgttctgccattcacgaccattccaatcggcggcggtaagtcccagccattgttgcggagccgatgcttccacaccctcaaagattttcaagttccagaccgccccgccaaatccgttcttctgtcctccggtaaaggtaaggcggacataacgagccttcaccttgccaaaatcgaccatcgggctgcctgccagacgattattccgcttatcagcgaaaacagaccaatgcttgccatcgacagaagtttcaattaaatattgataaaattgtgtgccatactcaaattgagtccagatagtttgtatctgccgggcaacacccaaatccatttctatccactcctgtcccattccacgaggacgccataaagttccgttattatcatctacagcatattcgggacggaaatcggcatcataaaaagaagaagccctcaccttagcacccaatgccagattttttgatttcactacagaagatgccaatgcacctattccgtcatgagtgggaataaggggtttaatacttccatcttcggcaaactccatacggtccacacaaagctgacgatgaaatccgcggttggaatgcggattatcatgacggtgatagaccatataatattcattgccttctttcaaaacgctatgatgtcccggcccatgaattgttccgtcggtattggtttcaagaatacatccccgataggtgtacggccccataggcttgtccgaagtggcatactgcacccgataggtgtggtcgtgacaggaacccgaagaatacataaaataatagatcccctttcgtttcatcacaaagggcgcttcaaaaaaatccgtggcttccgtatttggaatcagacgcgtttcagtaaaactcttcatatcggaagccagttttccggctccgcaaccgaaacctttataaattccccaagtcccccaatacaaatatacagaaccatcatcatccacaaaggtctgcccgtccaatgtaatggcattcgtcacaaaacggtcgggtacaagaacagcctcactttcgcccaatatatttttccaaggaccacgcggcgtttcactgaccccgcaatgaatcatacagggctgacaataaaaataataataattcccatccgtatgtttcatcacatcgggagcccatatccaatgactgtccggccagttcatgggcattaacgtccagtttacaaaatccttgctggtccacacctgtgcaggaccgaaaccggccccactgccatccgtagtggcatacatataatacgtatcgccaaacttcttcaccgtgggatcggcaaaatatccgggaataatgggattccccgtacccgaagcattaaaaggcttctgagcaaaacctgtagcagctcccaacaataaggaagcaacaaccaatcgtatcttattcatctctatatagcaaaattctatttgtccctgcgacgcttattcatgcaccacattatgaatgggaatttctatctcataaaaatattcctgcaacaaccggtacatatccggatcatacgtcttcagtttcgtgcggcggttcacccagttatgaactccgtttgcaggttcggcatagcggttacagttaaagaaagactgtacgcactcggcaaagtattcctctttattgctcactgcatacgtcttttcccacagccctttccggattgcattctgacgaagtgcctccaaacgctcattaaagtctggctccactcccactatacctaccgtatgaataaggtgagcgaactcatgaatcaggatattctcacctacatatttatcctgcggcaatgccagcagattctcttctccgcaactggatgaaaattcatcttccggtgctccgccaaaaccacgggcacgccagttccaatatttaatgctgtcctcacaattgcagatatgggcaaactccggcaaatcgcaagtttcctcatccttaccgataaccatgacgtggcaacctttcttcaccatgtgcgccttcacatccggacgttttgccaacatcaaactgatgatatcacaggctttcaataaggcctcatcgctcaccttcccggaagaggtgacatacagaccttctgtttctatgtatttctgatagaaagaaggaatatttttcccttcagggatactggtaacctgtccgtgaacagggcaaagctccaacttcatggcaaatccgcctcccgatgccagatgcaaagtcaaccggctgtccttatcaatccggatggtttccttgcgatagtcctcggcctgcttattggcattcacaccgtctttaaacaaaacagccgtataagacattccttcgggaaggaaagagaaatcgagctgcacatcacgttcatcccaattggtcataccgccgatataccagttcacatccttcttacgcaccgttacaatatattttcccaactcgcccgaagcaataaaagtagaatccacctccacaggcagagaagctatgaaatccacacattcctgctcattcagatagttggtaggcgcatcacacaacatggtaaaaggagaatcgtgtacaatataggcagccagctgatgacaccgggttcccatgctggccggtgtgtaatacatggcgcgccaatctgccttcgtggcattgcgcatagctcccggcgtataatccaccggtcccgccatcatacggatataggggaaagtaacatcataaagaggcatattattcttgatatccgtccatttcacctcttccatgccgaacacgctttcaaaattgataatatgggggtaggtacggttgatacctgtcggtttgtaaatgccgtgcagatcaagggttaatttataccgggccgtcatctcagcgatgcgatacaccatttcgacggcagtctgatcatcacgatccaggaaatccaccttaaaacctttgattcccatatccgcatatttcttacaagctgcttccaattggctgtcgagtacattaaacaccgtccaaagcactatttccacccctttggatttgccgtatgctatcagctccgtcaaatcaagttcgggaataacggtcagcatatccccgctcttcggatcataccatccttcatccaacacaataaactccaatccgttccggctggcgaaatcgatataatatttatacgtatccatgttgataccggctttaaacggcactcctttcagattccagtcattccaccaatcccatgccactttgcctgtctttatccatgaggtatcaccgatacggttgggagaagccagagcatagaccaggttgttgaccggcatatccgtatccttctccgtaatggccaacacacgccacggataggaacgggagccacggctacgggatataaaatcggtagtttcagttacatattcctgcttccgccaaggataaaagtctgttttagccggataaggagcaaagacacctttcaatccatactttccctgctgtgactgcacaaacatgcccggataagcttcgaggtcggactccaacagggtcagttttacgctgccgcaatccacggtaaccggaagaaaagccagtttaggctgtgcttttgacagaggaatgatgtcatatacattctgataagccatcgccatcggttttttatcattggtggtataaggaagataagccgtataatcttccttaaaattaaactcggcctgttcctcctttataatgatatccgaagattgtgtggtatagaatcgataggcgactccctcattgtatgcacggaagatgattccgaacccgcctttcagcttcaagtcgagttcgttgcctgttgcaacgaactccttgaaacggtaaaaaggtgattctatgttatcctttatctttctccttctttcccctgtgatacggggagttttacctactatagttccgttttccagaaccaaacctatattagagtgtgagagaattgtatcatttccatgcatcacttggtaggccagttcgtttccggcgctgatttccactttcaatgttccatcgggtgaagagagtacatatttcttttccttggctgcaaatgaagcatttccaatcaataaaagcaaagataaaattgcaagatagagtttcttgttgtttttcataatctatcggttgtatacattgttcacttgcaaagtaaaataaaaaaattacaagaaagggaatatataatataatgtaatggcagaatcgtccaataaatctcattttatggatttgacagttaggcggttgtactattcttccattcgtttagactatttttttatcgggtggaagagcgaataggaatacctattttcagtgtctaccctaaatatccggtaccatattatccaaagtcctcctgacttaatactattaatggaacctgttccaatgaagaacagattccattgtttaccaagtatattattccattgttcccgagacaataaattcaacatatcggctatgatcctctatcatcgcatatacaaaatgcgcctttatagtggttcctgaggcaatattaacatagcgtcccacaaaaacacttccttcaccagattcaataaagtagacacaattatctccatacgatgaaacattcgattttccgtcaaaccaataaccaagaccattggctgtatactcgctagtttcatcccaagtcccgtcttccttaacggggtacatagcaattgtaggagttatggaagagtcacctctagcatctccgctgttctttacttgttttgaaaattcgtctacggataatccgatacatggttctatagcatcggcataatctgcaaagttgattgaaaatcccgcataatctcctgctgccaatgtaccacttattacaattttagaggggtcagtaacagttacatcaaaagaaaaacgaatataatcatcaaagtcggcaccattgtttatagcaaatccgacattaatcgacataattgtacctacagaagcggtttcgagcacattaagaaccagctccttctttgttgcatccaactcaatactagctataccagaagctgcatcacaaacaccgcctgccgtattatagtaccaaccgttggtacccttggtaggagctgttctattccaacagtttttcgatatattgataggataaaacaccacactcccattagacaatgcagccaacgtctcatctaccgtcattcccaaatacgtatgaaacttttctgcataatcagtcagtttaaccgtcttcgcttccaaacggctgatgggaaactctgctttggtagaaaccacagcatccgcattcgtcttcagataggggttttcattctccccgtacacatgcttgctggtagcatcctccggatccgtactgcatgcagccagtgacagagtgaaacaagcaattaaagcatatataaaattctttttcatcgtactattctttttattaatctgttatcattatagttattactgtagtagcattaggatccaatggtattacatcttgaaacgtatctattgaactaatttttacaattttatcatatcctaaactattagttatatgcaagctacgatagtgtactcctgattcaaaaggtccagatattcgaaaagataacattactaaattgggaccgataataacaggggtttctactattgagtttatcccattataattagagatgatgcctctcactggagatgatacctctattgtcaccggagtttgatgagagcctaaagtttttatcattgaaaccctgaccaaatgtggatatgaagaatttattttattttccaaattccctgcataaacatgcaataagtggcaaaccatatatatgaaaagaatatactttctcataattttaattttataatttttaatctaatatcccggattctgcttcaacttaatgttgccatccaatgcagacttaggtaacggaaaaatatcacaatgcctgtctgtcttatccgtcttcgcatctttgcaaaaccatgacttgccattatatacattctgattggttccgtttatacggaaacggatcaagtcctgacgacggtgatgctctgccacaaactcccaggccagttcgtccaacaaaccacccagttcaatatcatcgcccccttcttctgtgataatccagttatcggcttctcccatgattccctgattctcccgatgtccgtagttataacggctgccacccttcaattgagctacagtaaccgttgctttaccgggatcggacttgaaggcacgttggcgtacagctgttaccaaatcggccgccacttgctcgctttctccattgtaaccacctaaacgaagcaagcactccgctttaataaaataagcatcagccaaacggaagaaaggcacatcatcataagaagttccatagtcgcctgaaagtatttcatatttcaccaagcgttcactttcaaagggatagcaaccggggttgtctatactgtgtaattcccgagtatataccaacggttcactgtccacataaatgggagcaccggcatagtcatattgctgtcctgatatccaacagtctttatagcgactgtctttttcatcgtatgtttccagaaattgaggaagaacagccgctccaccggtagcccatccgttaaactgccacgttgcacgtccggctacatgcatccacatatttgccatatagttacctccggcgtatttaaactcaaacggaataccaaagataatttcaggcgaaccggaaatatcttctctaaaattatccgaataattcggagccaaagagaacttgccactgttaatcacttcatttacctcatcaatagcctttccgtaataagaattatcagagtaatcattgaaccatgcattgtggttcaaatacatttttgccagaagcatattgatggcatagtcgttcagcttacccatttctacttttgttccacatttcccctttacatccgtcaactcactgatcaggaaatcccacatctgttggggagttgcctgttcgggcaaccatccgtcttcatgttcatattgcgtatccaatgggatgttgcggaacaaatcgaataaaatataataataaagagcgcgataagcccttaattgcgaagaagtggttatatcagcagcaatgacttcatctgccaacagtttgttacaggcattgataccggcatagttacggttccatgtatcattgaaatgggctatctgtgaatggaactgatgtttgtgcatagacacgtacaaatccccccagccgatactgatccgataaggaatacaccatgaatcggacgactggtccatcatatcggcataactataccatccccaatacacatcacgaagactgctgtataccggagcaaacatggccgcccggtctttttctgtaaactcatacttctcggaagcaatcgtatcataaatcgtttcgctcaaatctgtacaactgcccaaagacaaggtacaagctcctatcgctgaagcccaaagtgctttattgaatattgttttcatgttagttcttcatttaaaagttagaaagatacattcagaccgaaagtgaatgaacgggtagaaggatatttatcgcgccagtcaatacccaaagaccaaatatcaccatttgacatttcaggatccaatccatcatatccggtaatgcagaataaattatcggcagaaacataagcccggatatttttcacaaacttactgcttttcaatggaatgttatagcccaacgtaatgttagttattttcaaaaaatcaccatcctccaaataatagcttacaaaagtctgtttttgggctgttgataaggtatattgtccaccataaggagccttttgcacagatttcaagcgattataagcgatcgagttgttctcataataagcacgaggctcgttcagaatcttaaaaccaaactggcctgtcatctggaaagataaatcaaaatttttatatctgaacgagttgttccatcccaaatacaatttaggaagagcattccctaaatattgacggtagtcatcattagacagcatattgtctgtaaactcttcaatctcaccagtctttgcattttcaatcagccataagccattctctgaaacaccaacggacttcatgccataaaattgtcccatagatctccccacttccatccgctgggtagaaagattgataggttcacccaaataagcatgatctatctgatttgaagtctcatacaagtcatttgaaagactcaataatttgttcgcattatgagaggcggtaactgtggttttccattcaaaatcctttgtccgtacaggaatagcattgacagcaatttcaataccttggttacgcatcttgccggcattagccaaagtcttgttatacaaattgggaggagtcggtaccgtaaaatcatacagcatatccgaagtcttcttctgatatacatcaatagaaccactcaggcgttcatccaatacagcccagtccagaccaatattaaattccttggaggtttcccatttcaaatcaggattaggattggattttacgcttaacccctgatgccagacgccattatcatagaaataaggagaaccatactcataccgggttaatgaattataagagtcacctacaatgacacctgtcacaccataaccggcacgtaactttaagttattcagccacgtaaggccttccatgaatttttcgttactgatagtccatcccaaagaaacagaagggaaagtagcccatttattgttctcaccaaatttggaagagccttcacggcgtacactcagcagaacattatatttattatcgtaaccatagctcacacgtccgaagaaaccaatcaaggtattgtcattcttgtaactgctcatgccggcttttccatctttcaaagctgtacctaatcccaagttattccaaagataaaaatctgttggataatcatagttattagctccaaaaccttcatttacattatactggtaattatagcccaccaatgcatcaaaacgatgtttattccaagtatgattatatttagaagtaacttccagattatctgtggtatattcattctgagaatgataagcatatcctgtgtgattctcgctcttctgtgaaaaatattcggaagtataatatccacgattatgatcactagtaaccctacggcttaacatgaggttggtctgccagtttttaatcggttcaaaggtgatattccccgtcatccgggtattctcactattgtatttaccatcctgttcacggatgatacctaccggattataataataatttacggcaaaattctcgtaaaaagttccatcctcattccagatgggttcagtagggttacgcataatagcctgtcggtaaatacccagacctgccgcatcaatcggaccattcttatggaatgtctttaccatattgaaattcactttcaacatatcatttaacatccagtgagaaacatcaaacctcattctcatctcttcattataggtctcaagcaacacaccttcctctttgcgatacgtaaaatccgcagaataagtggtattttttgatcctccggaaatattaaaattatggttatgagtaaatgcagtacgggataccgcatccaaccaatccgtatcataccctttatcagcatagtttgtcaatccctgacggatttcctctgctccatagaaatcaagcgtcttgccaaacttggaaagagacatatacccggaataattggcagccgtacgcgactcgcgctggccgttttttgtagtaatcaaaataacgccattagcacctcgtgtaccataaatagctgccgcagaagcatccttcaacacatcaatagaagctatgttttcgggggaaaccgttcctaaaccaccttctattccgtccaccaataccaatggagtagagcctccctgcaatgaaatcacaccacgcaaacgaattgtagattccgcattcggatcaccggagcctttcgcaatggtcaatcctgccactttacctttaatcagttcggctgcatctccaatcttacctgctgtaaagtcttcggccttcacagaagccaccgcactggttacatctcccttgcgctgcgtaccataaccgattacaaccacttcatccatcagttcggaatcgtcttgcagggtaatatctttcttaccaccatttccgactggaatttcctgagtctgataaccgatataagaaacaaccaatatggatttggcattttttaccttcagcgtatatttaccgtcaaaatcggtaatggtaccgttggtcgttcctttttccatgatattggcaccaatgataggctcccctttcctgtctttcaccacaccgcttacggttacagtttgctgttgtaccatttcggttctcatagattctgttgtttccggtgttgcccatacactactgactcctgcacccgcagtaaggaaaagacaggtggtagccttcagcaaagccctgctgaacaaggcccggttctcatgtgttttcatcatacagttttatttaaaaggtttatatgttcattcagttcactttccattcaatcacccctcccgaagctcctttctgcaattgtgctgcaattttaagcccctttgttttgacaggtttgaaatccaaactattatagcaatctttttttacagtatattcagtcaacgcctctacctctttccaactttcgccttctttataatatagtttccagctttccggcacacggaaatccccgtcataatggtcaaaatccaaccaatacacttgtacgttcgatacggtataaggctggtcgaattcataagccagtgtttcgacagtaccgttcttcagccaccaatagtggtaaggtttcgagatatccgatgagcgtttaggttcccattggtcatttaccccccatgcccatgtttccaccgaagccgattcgggagcatctttctgtataggagcctgtatcatcagagtacgtgctttgctggcaatagtagcttccggagtggggcgggcatactcggccgcttcgggaatccatacagccatctggtcggcaccgcggttgttccatgtagaataaggaattgctttgaagggaacatcttttaccttaccattcctgtcaatttctttagctgtaccgctcagcaccattacgccattcaacaaaccggcatcgtaagaagcctccatcggagtaccgtcggggatgaatttgttgaatacagtactgtcggcctggtcttgtccttccagacagaacataataggaccccgttctatagccagtttgccacggtcatcctctacttggtcatttgctttcacacgacgtacctccataggaagattgatttcaaccacatcacccgctttccagttgcgtacaagggtggcataaccgtcatattgcttcgcattgactttggaaccgttcacagaaatgctgtaagcctgagccttgtctgtaaatgagtagagatctgtgggtacgggagcgtcttgcgcccatccggggatacgcacacgcaaagcaaactcctgttctttttcgggagtgacggcaatacttatctttccgtcccacggatagcctgtagtttgttccacatttattttattactttccgtttcaatatccgccttgctttggataaagagattgacatacacatcattgccttgagtggcatacatataataaggtactgaagccatgaaacgggttatgttgcccggacagcaggcacatccgaaccagtgttggcgctcatgctgccccatggattccaacggattgtcatagaagaacttgtcaccgctgagtgatacgcccgaaatgaccccgttatacaacgcgcgttccagcacatccgcatatttggcatctcccgtagcgagaaacatacgatgattccaatacacattggctatagaggcgcaggtttcgcaataggctgtgtgattattcagttcatagttcggaccgaatccttcaccttgtgggcgggaaccgattccgcctgtgataaagagttttttgccggccatattttcccaaatacgggttaaggcattgaaataggcggtatcatgagtcaaagcggctacatctgccactccggagtagagatatccggcacggacggcatgacctactatctcgtcttgttgcaggatgggcttgtgatcctgactatattcgctcagtttatgtccgtctgttcctctgccggtttcttctacaaaatacttagccgtctgcaaatatttctcatcacctgtcaccttatatagtttgacaagagccatctcggcgataggatgaccgctgggacgatggatctgcccttcgccgggtccgaagacctgacataccagatcggcatttttgatagccacatccaataatgtacgttttccggtggcgcgataatgagcaacggcggcttcgtacaaatgaccgctgttataaagttcgtggctgttgattttttcccagcggtgcgtgccccaccaaccggataaacgggtacattgattggttacacaagtagtaagataaccatccggttcctgtgcggtagctatgatatggattacactgtccagataatgatccagtttcccgtcatattttacggccagcgagtaggaagctccttctataattttatagggatcggtatcgtcgaaagaaaagtcaccgcgatgctcgcctttcatcagaccacccgcaatggcaaagttatcgaatcggccgttcttttcacattctttgaaagcggatgggatggaaacggtgcggttggtttcaatccgcggtgaccagaaattatcatctaaatgaacttgggtgaaaggaacttctttgataggagcatcaggttgtgtataaggtgtgctacatgcgcatacacttattatagcaatgctgctccatactatttgcaatttgtttttcatactatatctgtgttttttatttcagtatcaactatgtcaacagatgcaaagtaagtgaacaaaccattaagtagataaaagaaaaatctattatactgcgaaaatcgtcttaaagatgatcaatccattttcaacataataatattgattatcagtattttatactattgttatagacaattttttcattctattggacaatcgttttatcttgtaaagacaaggattaagcagatttgtctgttttttgagcttgaatagttggagatacttaattcttcttagaaaacctcaataagatccggtgaaactttcctcctctgataatataaattagattggcgttcctttcaataaaaaacttaatgatgcagctatgatatatgcgtatattcgggtttcaactgataaacagactgtagagaaccagcggttcgagataaatcgttttgccaaacaaagggatttccaaattgatgtgtgggtggaagaaacggtttcaggaacacggtcagccaaagacagaaagcttggcgtactattgaaaagaataaagaaaggggatacattgattgtgtcggagatctctcgtttgggaagaagattgatggaagtaatgagtatactgaatgcatgtatgttgaaaaatgtcatcctgctcacggtgaaagagaaatatgagctgggaaataatatacaatctcaaatattggcattcgctttttccctttccgcacaaatagaacgcgacttgatttcccaacgtacccgtgagggacttgcacgcagaatcgcctccggacaaaagttgggacgtcccatgggaggacataactcgaaatataaacttacgggaaaagaagaaaaaattaaggctatgctggaggcgggaaccagtaaggcggagatggcgaggaaattgaaagtgagcaggaatacattggcagctttccttaacagaaacaggacagggattccttcgaactgataaaagtgatatgtctgttattcgtaataagaagaaacaaagcctctgatagattattcttacttaaatttcggttttagcataaggatatacataaagcacaaaaacgctctgtcacagtaaaatgcacattactaatcacttccggtgtaaaagtctctcaaatccccttcaattggtatgtcggtggggaaacaaatccgtttttgggaatgctcgcattcgggaataccagcggacaagatgtagagtcagcccctcactgcctcccggctactcgtgggcatcatagttcatatctgacaggatactgtttgtttcggctattgaaccttgttgcgtatgtaataagaacctgtttctatcgtatcttcactccgttccgtttgatattccacctaagtgaagcaactattccaccctagtgaaaatggctgttcactaaagtgaaatcgcctcttcacctaggcgaagcaacgaacgcagccagacaaaatatgccacagctatgctctcttgcaaggaagcgaccacagctatggcacaggaattaaaacaacctgtatacgtcaagccgaatttgacagcggagaatggcaaaccgtttcaaggggacttggaatctatttacacagtatatcgttgatttacagtaatatactgtgcatgatttggaatggtaatgtgctgatgcagaagaaactgatacgaaaaatcatcgaaaaaatggcatcttatctttgtaattacaaatgcgacaagaagcaacaattttgtactttcgatgaaaacgtggatagaacggacgaatgaatgcttccattgtaagggcagacactgcctcttatcgattacaattcttcgcaaacaaccatttccatgcctcggtatacaacaatgattttatgtagcatggtagggcttatcgctttctgcacagactcgcttgaagcgtagcgttcagcttgttcaatggcttgtcgccttaattgttctatccgttcgctactgtcttttcctttggcatatttcagttcgatgatgtaggagtgacttatgtctttgtaaatatccaataacggatgcaagaacaggtcgacgtatccttcctgactgtctttctcggacacaggacgatagaaaggattttgtgcggtcatggcaagagtaaaaccatgaacaaaatattcacctttctgcttgtcccgttgcgaggcataacggtgcaggcatccggcaatgtattcaaaataaggtttccatttgccatcataagccagccctgaggcaagcttcctcttttcataactgtcgaaagtcaagtcgttttcatgataagtatccagaatgtaggcaaagagttgttcacgtaccacctagttggggatggtgagtttggtttctcctttatgcattccgctgatggtcagcattccgaagtagaaaagcaatcagttctatcaacttgtctaccgaatgattgaatgggcatgttgtggagtaatactccagcatatcccgtacatctttttctgtgaatcctgtcatttcattgaattgtggattcagcgtgtaattggtgccgatgttgaatccgctggtcaggtcgttcatggatagataataagataagaattgcgttcgggagtggggtgttgtccatggtagttttatccgtttacgataaaacaataccgggtgactcatattaacatcttcacatgccaagcttaaaataaaatatgcagtaatatatgtgtataattattttcttcttcttcctgtcaaaacaaaggggcttaaaattgcagcacaattgcagaaaggagcttcgggaggggtgattgaatggaaagtgaactgaatgaacatataaaccttttaaataaaactgtatgatgaaaacacatgagaaccgggccttgttcagcagggctttgctgaaggctaccacctgtcttttccttactgcgggtgcaggagtcagtagtgtatgggcaacaccggaaacaacagaatctatgagaaccgaaatggtacaacagcaaactgtaaccgtaagcggtgtggtgaaagacaggaaaggggagcctatcattggtgccaatatcatggaaaaaggaacgaccaacggtaccattaccgattttgacggtaaatatacgctgaaggtaaaaaatgccaaatccatattggttgtttcttatatcggttatcagactcaggaaattccagtcggaaatggtggtaagaaagatattaccatgcaagacgattccgaactgatggatgaagtggttgtgatcggttatggtacgcagcgaaagggtgatgtgaccagtgctatttcaagtgtaaaatcagaaagttttgtgaagggggcggtaaccgatgcaggccagctgatacaaggtaaggtagcagggctgaatatttctttaccttcaggagatcctaccggcaacacacaaattatgctacgtggtatttcatctttaaaaggtggaacttcaccattagtattagttgacggagtgccaggaagtctgaatacagtagcccctgaagatgttgagtccatcgatgtattaaaagacggttcggctactgccatttatggtacacgtggtacaaatggcgtaattattattacaaccaaacaaagtcgtaaagaaatggctcccaccattgattataatggatatgtttctgtatcaaacattttaaacagacctgatttcatggatgctgatgaccttcgtcagaaatggaatgaaggatatactttcaacggagctaacttgaaagatttcggagccaataccgattggctgggtgaactgacccgcacagctgtttctcattcacacaacttatccttaagaggtggtagtaaaaataccaattatacagcctccatcaactataccaaccggcaaggtacttttataaagactgactttgaagctataaacggtcgtatggacatcactcactctatgtatgacaataaattgacagccaatgtcagtacattcgtcagccaacataccatgcctcgcagttggaatacatacgcttatcgacaggctttgattcacaatcctacagaacctgtaaaagatgagaacggtgactggtttgagcgcgacttgtatttttatgataatcctgtaagttatatccgcgaaacaattggtgaaatgaaacgtaaaaacatccgtttcaatggtagcctgactttccgccctattgaatctttgaccttgaaagccatgtatgcccgccggagtacgacttctaccgatggatattaccaaaccaagaaacatgtatctacaaccaagagtggccgtaacggctatgcatatcgttatgattctgattttgataataatctgatagaattgacggccaactttcagaaagcattcggcaagcacaatgtcagtgtattgataggttataactatgaagacaacaccaactctaacctgtccatgtccaactacgattttcctaccgatgcttattcttacaacaaaatggaagcaggtatggccttgaaacgtggtgaagcttccatgaccagttataaaaattctgataaattaatcggattattcacccgtgtcagttacaatttcaatgaccgctacttattgatggcttctttgcgtcatgaaggctcttccaagttcggtaaagatcataagtggggtaatttccccggcatctctttaggatggagaattaacagagagaattttatgaaaaatgtgaattggatggataacctgaaacttcgcgtgggatacggtgtgaccggaatcaatgtagccgacccgtacacatcactctcaagtttgaattataatggcgctttcctgtacaatggaacatgggtcaaagcattggaaacaatccgtaacaacaacgctgacctgcgttgggaaaagaaacacgaattcaatgtaggtctggattgggatgtcctaggaggacgattgggtggaaccgttgactactatatacgtagaacaaaagatgctctttgggactacgaggttcctgttccgccttatatgtatccaaccatgctagccaatgcatcggaaatggaaaataaaggacttgaaattctaattcgtgctacgcctatccagacagaaaaattcacttggaataccaatgtgtcctattctactaattcaaacaaggtcgttgcactatccagcgagaaattctcgatggaccaagattatttctatacagggtataccggagaacccattcaaaccactacccatatcgtccaagtaggcaagcctataggtactttctatggtttgaaatcggttgatattacagatgacggactatggttggtagaaaacaaaaaaggtgaacatgttttagccgaggaaaccgatgccactgactggcaagtattaggtaatggtattcctaaacattatctgaactggaacaataccttcaatttctttaatttcgatttaagtataaatatgcgtggtgctttcggcttccagattttgaattaccaacgtatgtattatgaaaatgcaaaacctgaaatccagtacaaccgcctgaattctgcttttgacaaagtatatggcaaaacccaattgaaagatgaccaacgctatgtcagctattacgtagaggacggtgattactggaaaattgacaatgtgactttggggtataccttcaaactatccaaacagcatatcatcaaaaacctacgtatctatgcttcagtattgaatctagctaccattaccggttacaagggtatggatccggaagtaccattgagcagcaacacctatggattattggatgccggtactgacaatcgcgacaagtatcctaccaatcgcacttatacttttggagttaatcttacattctaaatctaattaaacaaaaaagaacagttatgaaactatttaaatatggtgtttatgcactctgtgcatctgccatgctcagtataagcagttgctttaatttggatgaggagccttattctgaaatcattgaagaagactatgtaccaaccgaagccgatgagatagccttgttggctaccacctattcacaattacgctttgtgatggactggtatggcttgtttgacctacaggaagaatcgggcgatgtaattgtcacacctacccgcccgaacggctgggatgacggaggtacttacaagcaaatgcacaaacacacttgggacaaccagcaaggacagccccaaagtatttgggactattgctataaaggcatcgccaatgccaataaaatattaaaacgtgccgatgaaggtttttttacagaagaaagtaaacctaaagtcgtagctgaggtaaaaggagtacgtgcactttggtactccattctttgcgatacacatggaaatattcctatacaaaccagtttcagtgaagagattccggttcaatctactcgtaaacaagtttttgacttcattatcaatgaactgaaagaagtaatgcccaatttgcctactgaagtcaataaatccacttatggcagactcactcaatggggggccaaatgcttgatggcacgtatgtatctgaatgctggggtctatacaggaactccaatgtggaacgaatgtctggaacaatgtaacgatatcattaacagcggtttgtttagtttagaaacaaactacacagatatcttcaaaacagaaaactccggatgtgtggaaacgatctttgccattccttatgatgaagtttataatgaaggggacaacaatggtcctgtttttggagcccacatgaaatttctatcttcaaacagtcgtaaggtcttcaatatgcaaaccaccccatggggaggttcagcagcaaaccctcagttcattaacagctatgatcctgatgatatgcggttaaaatatacatggctgcaaggtgaccagtacagcccggacggagtactgatcaccactttccccaataagctacccagtatttacaaaacagacacagatgacggttatcgggtaggaaaatacgaaattaaggtaggagctaaaagccttctaagcaacgacttcccttatttccgttatactgaagtattgctgatgaaagcagaatgtctgctccgcttaggacaaaacgaaaccgaagcagcccatatcgtatcacagatccgtgagcgtgcattccgtgaatcggctcatccggaaaaagcaacggttgatgcagcttggttaaaaggcgatacacacattaactatggtacgcttgacgaaaaaggtcagattgatgatgcgggtaatacagaagtcgtagaattaggcggactttatgatgaatggggatgggaatttgcagccgaggcccgtcgacgtacggatatgattcgcttcggaacctatcagaagaaaagttggtttaatcatactccgactgccaatgacttgaatggcaactctatcctgttcccgattcatttagatcatcttaatacaaaccctaatttacagcaaaatccaggctatgccggtaaataagaaataatgtgatagaaagcaaccttctttcttctcaatagttgctaattatttaaacaaatatttattttccagcccggtttaagttattagaaccgggctttatattcccatctcttataaaatcattacttaaaatatgctcatggaaatgaacagatatttatcttttactctctttacaggattatccctattgacaacaatacccattgaggcgtatacactaaatcctaataaaacagcaacacccatcttacagacaaatgttatcgaagtacgaagcataacttctgtacaacccatcgtgatctattgtcctgtgggaactgttcctcaattaccttatcaagtatgggtgacttattcagacggacaaggtgaataccgtcaaactaaatggtccaattccgctttatccacagaacaatcagaggctgacgataaagtttatcccattggaagccaatacacaataaacggattcattataggagacgatactacagaaaacggatatcctatcactgctaaaatagaggtggtagacactaaaaatacaatttcccccaagctaatagcccatactatccccttaaacaatgtaaagattaacggcaacaatcgcctgacctccaatcgtgatcttgccattaaagagattatcagttgggatgtaagccaacagctatataattatcgcgacacttatggactgagtaccgaaggatatacccggtctgacggatgggactcacctgaaactaaattaaaaggacatggttccggacactatatgtccgcactggcccttgcctatgccgctgcaacaaatccttcgcataaagaaattttacgccgtaacatcacccgaatggtgaatgaactgcgcgaatgtcaggagcgtacattcgtatggagcgaagaattaggaaggtatctcgaagcccgtgattttgcccctgaagaagaattgaaaaagatgaaaggtacatgggaagcttttgatgaacataaaacaaaatgggctacttatggctatggttatctaaatgcgatccccccgcaccatcccgcactgatagagatgtatcgtgcatataacaattcggactgggtatgggctccctattactccattcacaaacagttagcgggtctgatagatattgcaacttatatggatgataaaagcattgccgacaaagcattgctcatagccaaagatatgggtctgtgggtatggaatagaatgcactaccgcacttatgtaaaaaaagacggaacacaagaagaacgcaggacacatcccggcaatcgttatgaaatgtggaacatgtacattgcaggtgaagtgggaggtatgggagaatctttagcacgtctttcagaaatggtcagcgcccctgaagagaaggcgcgtctgatagaagcatccaattgttttgatagtccggccttttacgaaccgctttcaaagaatattgatgatatacgtaacagacacgccaatcagcatatccctatgatcatcggtgcactgagaagttatttaagtaacaatgatacattttattatcatgtatcccataatttctggaatttaatacaaggaagttatcgttattctaccggcggtgtgggtaatggcgaaatgttcagacagccctatacccaaatagtaagtatggccatgaatggcgtatctgaaggagagagtcactcaaatccacatatcaatgaaacttgttgtgcatataacttgctaaaattaacaaaagacctcaactgttttaatccggacgatgcccgttacatggattattacgaacggacactttacaaccaaataatcggctcattacaccctgaacactatcagactacttatcaatatgccgtaggactaaatgcatcgaaaccatggggcaacgaaactccgcaatctacctgctgcggaggtacgggatctgaaaatcatgtaaaatatcaggaagcaacctactttgtttcggacaatacattgtgggtagccctttatatgcctaccacactccattgggaagagaaaaatatcactttacaacaggaatgtttgtggccagcaaaaagctccacaattaaagttactgccggagaagcccgatttgccatgaaactgcgagtaccttattgggccaccgacggctttgatgtaaaactaaatggaatctctattgccactcattatcaaccttgttcatacgcggtaatacctacccggcaatggaaagaaaatgatatagtagaaattacaatgccattcaccaaacatatagactatggtcccgacaagctaccggctgaaatagcaagtaaagacggacaccaacttgaaacggcttgggtaggtacattaatgcatggaccgtttgccatgacagctaccgatatcactaattggacggaagcaacactcaatatagactcacgtcttgccagtattaccgttgttgaacctaacggtccgcaaaccggtactacaggaaatttatatacactgatgcaaggtggacgaactttccaaccagattattatcgccatgaccatacaactcattacttccgcatcaatcatattaaagatcctactgtagaactgaaaatggctctgtcggcaaaattacgagaaactacggcatttagtaaaagccattacacaaaagcaagtttcgccaaactaacaaccgctatacaagagggagagaaactaatgaaaatatctcctctgacagaaactaccatttctacttgtgtagacaatattgacaaggccatagaatcattagtcgcctcccgattagataagagcaatcttgaagccagtatccatatagctaaaaaatgtaatccggacctttatactactgatagttttaaaacattgcaagctactcttgaaagcgcccatgaagtaatggataacattgatttacaaaccgttattgacaaacaaactttatcactacaagatgccaccgcttctttggtactggcaaataatgtagataaaacagaattaaaggagttacttaatatagctatggaacgccaaacaaaccaagaaaaatggaatgctctcgcagtcaagattcctgaatttgctccttgggctcatttcgggtttacccgtttgaaacgtacattggaacatgcccaaaatgtatattttaataaggataaaaactactcccaaggagaagtcaatgccatagtagctagtttgaataccgtcatcaatacaatgagaccgggtaacttacccgaaatggaagatttaagacctttatctgctctattaaggcgcgtaggcaccatagacgattctacagatccgacattaaaagacgctgttgcattcactgaaatggtcataaaatacgtagcagacggcagtggcacacatgatatgatagaaacagctatcagccgcttaaaatctgcagcaggattatgataagctagcttttagagaatgtctgaaaaggtctattgaaagattcatctggaatcctcactttttcttcgaattttctcttttctttctcagaaaaatagtaatcttgcataagatttagaaaataagaagaaaatactatgaaaagactagtcctattgctattgaacttactgatgccgatgattctgtttgcagcgtccaatgacctctgtttccgtcatttttctgtagaagacggactatcatccaattcggtacgtgctttaatgcaagataaatacggttttctatggataggaacggatgaaggactgaaccgctatgacggtactactgtaaaactctatagactgaaagataggggagctaatgaagctatttcatctttatacagcaccctcaataagatatggataggtacagacgaaggcatatatatctatgattacgaaacagaagatataatgccttttgtactggccacctcccaaaatatccatattgaaacaaatacgaaccatattgtcgaagataaagacaaaaacctatggttcactacggtaggacaaggaatattcaaatacaacactatcaccaaccacttggagcaatacgaatttaaaaacgcaaatggtttaatggcaagtgtactggtggatagtgaaaaccaaatatgggccattaccaattggggaaactcaggtcttttcaaactgaataaagcagaaaataaattcgagacttttccgctctcctatgaaagcggaaagcatgactcaaacgcattggtcatgttggaagactcggaacatacactgtggttaggaacctgggagtgtggtttgcaaaaaatcgataaatacagcggaaaggccactacttatctgcatcccacagacggaaaaggtgccacccatattcattctatcatggaatatgcccctcaccagctactcataggctcggatgacgggcttctgttattcaataccattacagaggaatatcaattgtttacagaagatgaaacaaacccacattcattgtccaaccgttttgtttatcctattataaaagatcatgaaggtggaatatggatcggaacttactatggaggagtaaattatatttcacccaatactggacaattcgaaagttttgtccactcacgtttttccaattctgttaacggaacagtcatcggacggttctgcgaagactctaacggagatgtgtggatcgcttcggatgacggagggttaaactgcttttctcctcaaaatagaaaattttcccattatttgcccttggagggaaaaaacagtctgtcctatcacaatgtacatgcactttgtatggacgatgataatttatggatcggtacttatactggaggggtaaacgtattaaatctgcaaacgggaacttttaaaacatattctgcctatcaggataatcccgcctcactggacggaaccagttcttatgccatattcaaagacagaaaagagagaatatgggtcacctccatgtccggagtaaatctatataaccgggaaaaagataatttcacccgaattaaagacttggacgcactgaccattgacattgaccaggataccaaaggaaatctctggttctccacccaaggcaagggattatttaaataccatccagaaaaacagatatggaagaactatatacatgaccataaaaatccgaactcactggcaaacaaccaagtgaactgcgtactgattgacacaaacggagagatgtgggtgggaaccatgaacgggctctgcaaatacaatgcggaagaagatgcattcgaaactttacctcttgaaattcccagtcacaatatatgcagcatcatcgaagaccaacgcatattgtggctcaccaccaccaaagggctagtgcgctacacccctggagaaggttgccgagtatttactaaaagcgacggactgcaaagtgaacaattcctacctaatgctgccttaaaagcatcggatggaaaaatctatatcggctcagtaaacggattcaatgctttctacccccatcagattaagacaaatgtgatgcttcctccagtaatcattacagaactggaaatagataataaggaaatccaaactggaaacaaactgcttccaaaatctctcaaccagttggaagaactggagctatcctataaagaaaatgcattcagcttgctttatgcctctttaagctattgtacccccaataaaaacaaatacgcctataaactggaaggatttgacaaagactggaactatgtaggctcccaaaataaggccacttacaccaatttgcccgcaggaacctatcttttcaaagtaaaggcgaccaataatgacggaatatggaatgaaaaaggaaccagtctgaaaatcaccatccaccctcctttctattggtccaccgcttccaaactgctctattttgtattggtttgcatagctttcggattcgtcatccgcttcatcatcaaacggacagagaagaaacatacggctgaaataaacaaactgaacgccaacaaggaaaaagaagtacacgaagccaaaatcaagttcttcaccatgatagcccacgaaatacgcacaccggtatcccttatcataggacctttggagaaaataatgaaatctcccgtgtccctgccgtctacagtacgcgacgatctgaatattattgaccgtaacagccagcgtctgctgttcctggtaaaccaattgctggatttccggaaggtggaacaggaaggaatgaaaatgaagtttgcttcccaaaatatccaccaactgctcaaagcggtttgtgaacgtttcgaacctttcatcgcccaacatggagcacggcttactgtgaaatatcctgaagcagatttcacggctatagtagacagtgaggcggtaaccaaactagtcagcaatctgttgaccaatgccagtaaatacacaaaagatgaagttactcttacctgtatcgtacagccggaacaacatacttttataatccgagtgacagataacggcatagggatcagcaaagaagaacaaaagaagatattccatccgttctatcaggctatggataacaagccgggaacaggtatcggcctcagcattgtcaaaagtatcgtagaatcacacaatggctgtattgaagtggaatccgaggttaacaaaggatcatcttttatcgtaacgttgcctatagaacaagcacaagtcctgccacaggatacgggcacatcactattgaacaacccagccattcccgaaggaatcttgcaagaggacctctccggttctcctatcaaacataaaccaaccatgctgattgtggatgataatgaggaaatgttgaatttcctttcgagtagtctggctgataaatacagcatacttaccgcagaagacggtatagaagcactgaataaactgaaagaaaacgaagtgacactcattgtaagcgactggatgatgccacgcatggacggagtggaattttgcaaaacgataaggactaaccaggctaccagtcatatacccttcatcctgctaacggccaagacagataccaactccaagatagaaggtatggattgtggtgcagatgcctacatagagaaacctttctccatgcaatacttggaagcatgtatcaagaatctggtagacttgcgtaatctgctgcgtcagaaattctcgaagatgccgttggttccgctgaacagcattgccaataattctatggacgacaagttccttacccgtatgaatgaaatcatagaagagaatttctccaatccggaattatccgtagatttcctggccgaaaaattgtgtatcagccgttcgggtctgtttgccaaaataaagacattggccaatatcacccctaatgaactgattcaagtggtacgtttgaaaaaagcagcgatcttgctggcagaaaacaaatatcgcatcaatgaaatctgttatatggtaggattcaataatccgtcttatttctccaaatgtttccaaaaacagttcggcatgaaaccgggggaatttgtaaacgggaaaagagaagaataaaaactaatcaaaaatcatttcctaaaaataaaaaatccggtttccccttttcagagaaaccggatccatgatgaacgagtggttttatttcaatcaataattattcttcttcacttcgaaataagcttgcggatgcagacatgcaggacatacttcaggagcttccgtacctacataaatgtaaccgcagttacggcactgccatacagtttcttccgctttcttgaatactgtgccttcttccacattcttcaataaagccagatatctttcctcatgccccttttcagcttcagcgattctgcgatacatagtagcgatagcaggaaaaccttcctgatcggccacatcagcaaagtgagggtaatcagtagtccattcttcattttcaccggcagcggcagctttcaaattttccatagtggtaccaatgatacctgcaggatagctggcagtaatttctaccataccgccttccaaccatttaaacatacgttttgcatgttctttttcctgatcagctgtttctgtaaaaatagctgctatttgttcataaccttccttctttgctgtacttgcaaagtaagtataacgcattctagcctgtgattcacctgcaaatgaagtcagcaagtttttctctgtctgtgtaccttttacgcttttagccataattgttagttttattagttagtattatttgatcatctgttgatgacacaaagatatatattttatttcaaaattgtatttattacaattacgtttttatatttaattaaacgttcactttatataaaataaacaagaacacctatatttgtgttcacaacaacattaacattttccattatgaaaaacatcatcaaattattcacttttcccctccttactataataggatttaattcatgtgcgtccataccgttaaaaatcggagagtctgaaaacaactccacttacactgtcagctatctgtttgaacatgacggttgcaaggtatatcgtttttacgataaaggaaattacgtttacttcactacgagaggagatgtaaccagtatcacaaatgattctaccgcccaacgcaccattaccatcaacaaaacaccctatgaataacaaaaatacgaatttaaatagaataataccttaatttatacattaattttatctacttttgcaactcgtttaaaatcatagcataaagtagttgacaaatgaaagcatttgaattcaaaccgaagctcttcactaccctacagaattattcaaaagagagcttcatggccgacctcatggccggaattatcgtaggtattgttgcacttccactggctatcgcatttggtatcgcttcgggagtttccccagaaaaaggcatcatcactgctattgtagcaggatttatcatctctttattaggaggaagcaaagtacagataggcggacctaccggagcatttatcgtaattatctatggaatcatccaagaatacggcatcagcggattaacagtagcaactcttatggcaggagtactccttattttattaggtgtattcaagctgggagctgttatcaaattcattccttatcccattattgtaggatttaccagtggtattgccgttaccatctttacgacacagattgccgatatcttcggactgaacttcggaggagaaaaaataccgggagacttcataggtaaatggatgatgtatttccgtcattttgatactgttaattggtggaacgccattgtcagcatagtcagcgtcctgattatcgcactgactccccggttctcaaaaaagattccaggttcactgattgccatcattgtagtaaccattgccgtgtacctgatgaaaacatatggcggaatcacttgtatcgacaccattggcgaccgttttaccattcagtcacagctgccggatgcagtagtgcccgaattaaattgggaagctatcaagaatttatttccggttgccatcaccattgctgtactgggagccatagaatctctgttgtctgctgccgtagccgatggtgtcattggtgaccgccacgattcaaacacggaactgatagcccagggcgcagccaatattatcgctccgctgtttggcggtattcctgctacaggagccatcgcacgtaccatgaccaatatcaacaacggtggaaaatcacctgttgcaggtatcattcatgcagtcattctgttgctgattctcttgtttctgatgcctctggcacaatatatcccgatggcctgtctggcaggtgtattggtgattgtttcctataacatgagcggctggcgtactttcaaagcgttgctgaagaatccgaaatcagacgtcaccgtattgttgatcactttcttcttgactgttattttcgatttgaccgtagctattgaagtaggtttgctcattgcctgtgtattgttcatgaaacgtgtcatggaaacaacagaaatatcggttatcaaaaatgaaatcgaccccaataatgaatccgatctggaagtgcacgaagaacatctcatggttcccaaaggtgtggaagtatatgaaatcaacggtccctacttctttggtatcgctaccaagtttgaggaaatcatgtccgaactgggcgaccgtcccaaagtacggatcgtacgtatgcgtaaagtaccattcattgattctaccggtattcacaacctgactaatctatgcgaaatgtctaagaaagaaaatattcagattgtgctttcgggagtgaatgaaaaagtgcatcaaattcttgaaaaatcaggatttaatgaactgctgggaaaagaaaatatctgtcctaatatcaatgtggctttggagaaagcaaaggctattatagaaaaataaaataagaaaggagagcattatggactaaaataaatgctctcctttttgattctattctgctaatgaaggacaggaatagaaagccaatatccttttttcagtaaataagtgtaaaatgcccccatactcctcactggtgttttaaaatcttgaaatcagatttatcattaaaagaccttatccgcatccctaagcccttcctgccatatagccaagtgctttcttcgtgtttgttgtatttccatagcttatggaaatagataaatgaatattcaatgcctccaacagcatatttcctaaaaggctgttacctcccccattataccgcatatcaacaaccagcaaagaaactcccctttgattcatatcctgaatcatgtgttccaaaaaatggagtataaataaaaattcccgttaaaatagcggacagaaaatggatatagcgacaacggttctatattcacaaaagtatgggcatcctgcaaaagaactaacaattcattaattctcagctggaaatcggctaaagtgatgttatttattcatatcacaaagctcatcgcaagcggacagaacaaacagacagcattaagctttcaatgacttgtcaagaataaaagctggatgtaccttggtcagaaagatgaaaaagttcatcagttcgttctgataaagattaaagcttccatcattataatcagggatagaagtatattccattattattcaaatccattcaattgcaagtatgtgaaacaacgtatctccagtctttgaaaaatatccaggaataaattatatgttttaatagtgacctgaaaaagtaagatatgttcatgagcaaagtaagctcacttcatcggcaaagtaagtcaacttacttgccctttgaagtcaacttacttttttctcaatacgagaccgataccggaatgccggaatcctttatcaattttcctattctgtccaattcctcatgagtagccttttccaaatcatgatcgggcgtttcacggtcgatggtgtaaatcatcacctgacggggagcaatctctttcaccgtttccagccagggcagcacataccgatctgaagtattatccacatcctgcccttgatatttacctttcatgaacatggtctgaataatcagattacctttgaaagctttcatcccttttataattttccgcacatcatagtgcccggtcgggcggtctgtcaatcgaatataatccgtatcaatagtatccagcttcaatatattattatctatcttattcaatgcatcaaatacctccggtttgtgaataaaagtagaattactcaatacactcacttttgcctgaggaaaatatatatcacgcaatgccaaagtatcctctataattcctgcaaagtgaggatgagccgtcggttcgccattaccggcaaaagtcagcacatccggtttaggaccattttgctgcatatcaatcaaacgggcttccaaagcctcacgaacctgctcgcgagtaggcagtttcttttggggacgatgatcttcattaaaaccacattcgcaataaatgcaatcgaaggtacaaaatttaccatcttcaggaagaagattgattcctaaagacactcccaaacgacgactatgtaccggaccgaagatgggagaaggataaatgactgttgacatagttcttttttcagttgataacagtacaaaaatacagaatgtttttcaaaatttcagtctcaactgcaaataaaggtcactctttgtactgccgtcaatttcctccaaagcggaacttatcttatcccgattgaaataatgggtagttccgtacttggcctgcaagataatgtgtttattcaattcataacgggcgttcactgccacacgcatacctttataatagaatgaaggcatggaaaaagcatagagcacactcttttcatagatagtaagacgggaattatagtcatccgtattaaaccatgcggcactcaaatcaagctgaagaggaagcaaatgaaatgtataagcagcactttgagaaaccagaaaaccattggaagcagattgcccacgaaagttgatgcgtacataatccgctatggttttcaatgtcagtttatctttcacgctataattcaattggtatcggcatttctgctgaatagatggaatagtttgcttggttttatccgcagcagtgaagtccttttccttctttttataacgatatcttataaacatttccagttcataagtaggtgaataacttaattggagtaatccatccaatcctttggttcctgctttgcttactaaatatttcttccaagggaaatagaaaaaatcaccataacaagtcatttttatatactttaaaatactggtttccaatcctatataaaatccactctcattttgtaccgtacttccctctcctatagaacgagcataaaccgattgatatttggcatcataatacctgttcataactattaactgtgttcctcctttcggtgaataacgtaacatattcatggttgcccaagtaccacatttgtctatagccgtttcacccaataaagagaagcgtttccaaaagaatttataatctcctcccacattataaaagtcctttccacggggataataaatattatagtacttcttctcaggattcaacggcttgttgaaaacattataaacagctgttaatcctaactcacagtactttccattataatttaaattactgccaaccaactgattagttaatgtatttttcttctcaaactcacgatacaaccgatgatatccatcttttttcaacgatcttataaactggttatcaacaataccatccatcttccgataagaatagaaaccatccaatgtccatcttttcgccaacttatagctgactgccattccttgaaaatagttatattcatcggtagaagaatgcttgcgtatgccccggctcttatttcccaaagtagagagtgtagctgtttttcccatcccgaaatcagtgttgataactagtccataaccatagctgacacggtaattaccaagagctaaagtcttgatatgacctatattacgaattaacaagtatagtgaataaaaatcataaccttttttattttgtccggtaaagaaaggttctcctgcatccttttcagcagtaattcctgcataaatctgatcccgataatgaaaactatatcgcagattatgataatatccatatcccaaatactgtttgttcggattcttttttaaagtttctgccgggtactgttgatacccggccttcgtataaaaaggaatatcgacacgtgttgataactcttgtttaccgtatttcaatattcgctttatatttggtttatattgctctttttcaggagtttcaaagcaaataaagggtagtaaatagtgaatagtctgcctgtcaatatcttcaatcatccataactcattgcgggtaagcataggaccatatttgtacagataatacaatatattctctaccagttggtcagagagaaatggaaaacgttccagttgctctttagttgctgtattgatattgatgggattttcacgtaattcggaaagctcctcaaagtgagtatcccattgaaacgaactgttttcatcttcatccatcaattgctctgccagttcttcccatacttcctgcgcacacaggttatgcaccgataaaagtattgtaatacagataattaacattactcttaacaacctgttcattttgtaattcattggcgtgttttaagttaaatagttttatccactatacagagtaatcatatttcttgctacttttgcaccaagatgaaaaggaaactctttatagcattgtttttttcctttatagccgctgctgcttattcccagcaacaaacgactactataaacggatacatggtacctgtatgtgtatacaaaggagatactattccagctgtacagttacctaatgtatacattttcagaccattaaaattcaaaaacgaaaaagaaagacgggaatactaccgcttggtaaggaatgtgaagaaaaccctgccattagcccgtgaaattaaccgtgctgtgatagaaacttacgaatatatagaaacactgcctgacaaaaaagccagggaaaagcacctgaaactcgtagagaagggactaaaagagcaatatacaccgattatgaagaaattaaccttttcacagggtaaactgttgataaagttagtaaaccgtcaaacggattcttcctcttatgaattggtaaaagcttttatgggaccctttaaagccggattctatcaaacttttgcagcactttttggtgccagcctgaagaaagaatatcatccggagggagaggatcgactgaccgaacgggtggtattgttagttgaaaacggacaaatctaactgattcctactgtttgaattttactcttattatctgaatttcattaatttattggcaaactcccataaaataattcctgtggtaaccgatacattcaacgaatgttttgtgccgtattggggaatctcaacacaaccgtcgcaagcattgaccacttcctgctgtacccctttcacttcatttcccattacgatggcatattttttatcggcatccagttccagtttgtccagcaaagtactgccttccacctgttcgatagccaatacggtaaacccttgatcatgaagttcctgaacggcatcaagcgtattctttttatatctccactccaccgaattctcagctcctaaagctgttttatgcatttcgggatggggaggagtggctgtaataccacataaataaatgcaatctaccaaaaatgcatccgatgtgcgaaacactgaccctatgttgtgtaaactgcgtacttcatccagcaccactgctaaaggcaacttatcggctttcttgaattcgtctacagtaagccggttcagttctgttattttgagtttcctcatactctattttctactttattattaacggttacaaacttacataaaaatctatgatctttacgcctatataatgaaaaagaagtctctcctactctctttttatttttacttcattcctaaactcaattgtaaaacagatggatttctttatacaagaaaagataataactaattcacatccccctgttgataacggttgaaaacatgtaaaaaggatgaggatatcatttcaaaagtatttcttgcatatttcaaataatggtataatgtacacttaaaatcaacaatccaaaaattaatcacataacttaaacaatcaatatcaacacaatttaatcactatttcaggcgttcataaccataaagtttttaactcatattcttatcaacaatatgttaatagaataagtaaaacctgtattatcagtatttaagccggttgattatttattcatatcttggtattatatataaataacttatcagacaagagaaagaactcttttttactaacaatataaacagcctattattaataccatatttcttttttttgaaagaaggagaaaaaaaatagatataatagatacaaagaaattgttggtaactgttcattgtgtttcttgaaatgtaacctgtagtaatttcctgcgtctaagtaacagaaataaaaggtagaagatcgcggtctttttattaactaatgcactaagataaagaatatgataaaaagaatattggttgccacatcacttttgtgtatgtgctgcatactttttgctcaaactgtacaggttaaaggaaaagtagtttcagaaaatgaagcggtggaatttgcgaatgtcgtattgcagacaaaggattctatatttatagccggaggagtaaccgacagtaaaggaaggttcatgatggagaatatccaagctggaagttatctgctttgtatttccggtatgggatatacctcccggattatatcattggatcatttagctgtttctaaggatttaggcgttatcatgatatcgccggaatcgatcctgttaaaggaagtggtggtaacgggagccagtgtgataaatgccgccgacaggaaaattatccttcctacagcacatcagttaaaatcggccggcaatggtctgtcgttattgcagcagatgaagctgagcagaatacaagtggatcaaatgcgtaacaaggtaacatcctccggtgaaggggatgtacagttacggataaatggagtaaatgccgagatacaggatatattggtccttcgtactgaagatgtgattcgtatagaatatcatgatgctcccggtttgcgatatggggatcatacggctgctgtgattgattacattgtaagacggcatgaaaccggtggatatgtggctttggatgcgcaggattctccgcacgtactttttggaaacaataattttatagtgaagataaaccataaaaagtcagaattcggtttgaattataataatgtttatcgttcggtagataattattggcgtaataattgggaaactttccgctatgaggatggttcttcctttacacgggtggaagatggtattccgagtagaatttccacttatgggtataatataggattgaattatagttttcaggatcaggggaaatggttctttaattccactgtacggtgggcttttaataagaacaagcagaataaccaaagcagtctgtatatttgggagaagcctgaagaaattttgatgatgaaagaacatagtacgggccggacttcccgtccgtcggtggacttgtattttcaatgtaaactgaacaatgaccagtcattgattatcaatgctgtgactacatatattgacactcaaagtgacaggagttatacggaggggaagagtaatgaaccgctgactgatatttattctaccgtatcgggaaataaatactcatttataggagagggtatttatgaaaggaaagtaaccaagaagagcagattgagtgcaggagtgaaatatcagcaaagtctggcggataatacctatggtggaaacgagtcatctgaaacaaagatgcatgaaacccatgcgacagcttatgtggaatacagtgggaaaatggatcgtttcaattattcttttggactgcaaggcagttattcccgattcaaacagaaagaggaaggatataacaggtattcgttattgccccgtttgagattgggatatcaattttcagataatgtctttgtccgttaccggggacagatttcacgtaaatcgcccggtttgtccgatatgggaaatgtgagacaattaattgactctttacaggtgagaagcggaaatccggaattaaagatattcacagtatataaaaatgagttggaggcagatttccggaaaggtttgtttagtggtaattttcatttgtcgtatcagtatcagcacaggcctatcatggaagaaaccatacgagataagaataacagttttgtccgtaccaatgccaatcagttaagttggcagaaattgaatcctgagttggaattgaaactcggtcctctgaaagatattttgactttttctttttccaccggtataaattattatgatagtcgtggcttggattatcatcatacatataccaattggtattacagggccgaagtgatggcatcttataaaagatggtccggattctttcaaatggaaaatcatcggaataatttctatggggaaacgttgtcatacggggaaagttttcatactttgggattgtcctatcgatacaagcgtttgaatatcgggatgatgactttgaatccatttgttgataattacagaatgggaggagaaatgttcagtaaagtggctccttctaagaattggtggtatgtgaaagagagctgccgcctgtttgtggtaaaagtatcatggaatatcagttttggacgtaagtatgaaaccatgcagaaacgtgtgaataacgaagatagcaatgcaggtacattgaagtcggggaaataaaaatcactattttgggtggtcataaccataaagtttttaactttgcatattatcaatacccatatttctttttttgaaagaaggagaaaaaatatagatataatgaataaagagaaatggttgaaaaaagggtatgttaccgaaccggtagacaaaactctggatttgaaaactgaaattgataagttgcgtaaggaaaagaatgcgcttatcctaggtcactattaccagtcgggcgaaatacaagatattgccgactttgtaggtgacagcttggcgctggcacaatgggcggctaaaacggatgcggatatcattgtgatgtgtggtgtccactttatgggtgaaacggctaagattctttgtcctgataaaaaagtgctggtaccggatttgaatgcaggctgttcattggccgacagttgtcctgctgatgagtttgctaaatttgtccaagagcatccggattatacagtgatttcgtatgttaacactacagcggctgttaaagcggtgaccgatgtggtggtcacttctactaatgccaagcagatcgtagaaagttttccggcagatgaaaagattattttcggtccggatagaaatttgggtaattatatcaattcgattacaggacgcaatatgttgctttgggatggtgcctgccatgtgcacgaacagttctctgtggagaaaatactggagttgaaaaaacagtatcctgacgctgctgttctggttcatcccgaatgtaaaggagccgtttccaaactggccgacaaggttgcttctacggcaggattgttgaaatatgccattgccagtgacaaaaaagactttattgtggctacggaaagcggtattttgcacgagatgcgtaagaaatgtcctgagaagaactttattcccgctcctcccgaagacagtacctgcgcttgcaatgaatgtaatttcatgcgtctgaatacgctggagaagctgtacaatacgttaaagtatgaatggccggaagtgacagtggatgaagctgtggccaaggaagcggtgaaaccgattaagaagatgctggagatctccgagaaactgggattatgacttttgtaaaagataacaagatgtggttaataaaagacgtttctgttattcttaaaagtaaaggggaattcttctggaaaggatttatcatcggaataggagtgacatttctgtttcattaaagatttgttttgacggaataatggttctcatggaaatcattattccgtcaaaattgttttcaaaggaaaacagaatacttgtttttatgaggctcaatagaggtaaacaaatgatataactaatttatatagttacgccttcagaaaccggcaaagtttctctacggccagcgcacggtgactgattttgtttttcgtctcattgcctagttcggcaaaagttttagtatatccttcgggcacaaagatagggtcgtatccgaaacctgacgaacctcgtttttctttgataatctcaccttttacaattccttcgaacaaatgcttctttccatccagaatcaggcagatagctgtgcggaattgtgcttttctattttgcactccctgcatattctgcaataatttttgcatattggcttccgcattgtgtccttcgcctccggcataacgggcggaataaacacccggagcaccattcaaagcttccacttccaggcctgtatcgtcggcaaaacagtctaaaccgtagtttttataaatatactccgctttcagcatcgcattgccttccaacgtatcagcagtttcggggatatcaacatggcaatggatatctttcaaactcaataattcaactttttctcctagaatggaggatatttcatccagtttatgagcattgtttgtagcaaatactaatttctttttcattttatatcatattaattgaatgcaaagatactgagaatgaaccaaagtaagataattcctgacagaataatataggtgaaaaggtaaatagtaatttgtttgctatgtgtattttcaatttttgattatttttgttggtatcatttgatacttgatagtatggtatatatagaaactcctcatttgttgttacgggactggaaggaagaagatattcttccgtttgtccgtatgaacagtgataaagaagtaatggaattctttctcactactttgacagaggaagagacgatggctttttattgtcgtatccggaaagaatttgaagaatatggttatggtttgtatgctgtagaatgtaaagaaactcagaattttctaggctatgtgggttttcataatattgctttcgagtcggattttactcccggagtggaaataggctggcggttgtgccgggatgcatggggaaagggatatgccacagaagccgcttctgcctgtctggattatgcgagtgataatttaccttttaaaacggtatattcgttcactgccatacccaataaacgctctgaacgggtcatgcagaaaataggaatgcattttgaaaaagagttcgatcatcctttggtggaacaagagcattggttatgcagacatatattgtataaaatagaaatttgagaaaatagattaaccgatatgtagtaatcttatcattgcttcatcgttctgtttttcaatgcagaaacagtgaagcaatggaagagattattttttagttactttatttttagtttgtcgaatccttcgccatacactcctaccacattactttgtgatataaatgcattgggatcaatatctttcaccaatcggaatatatccagtgactggcttttctttgccagtaccactacgaccttgattccttgtttgctataccatcctgtaccatccaataaggtaactccacgatctatttgtttggtgattccttcggctatttcatcatgtttacgcgagaaaataaggaactgtacggattggcgtgaactgtttataacataatcaatcacaatgctcataataaacaatacgcagaaaccaaacaacacccgtttccagtcatggaatatgaaataacaggaggatatgatgacaatatcacaatacatcatcatgcggccaagggttacatctttatatttattgataatccaggcaatgatatccgttccgccggtacttccattattgcagaaaacaatgccgataccaaatcccagcaagccggcacctactacacaagccatgaattcttgtcccggtcctaacaattgcggcagtgtaccatccgggtttttcaataatgcttgaaagagccataataggaatgtcagcataaagatggcataaatggttttaaggctgaatttaggtcctagtatctttaatgcgaaacctaaaaaaacagcgttgataataaaataagaaacctggatttcaatgcctgtaacataatatataatggctgaaataccggttactccgcctgtagttatttgataaggcagtaagaaagccgcccatcccagtgcatagcaaatcagtccgaaggtaatggataaatagtcttttacctctctgcctagtttgatttttaatatttggtccatggtaatgaggattgtttttaatgtaagtagaaaggtgtgtcaaaagttactgcttttgacacacctcaaggatagtatcgattataatacgatgtttacaattttttttggaacgatgattacctttttcggggttttgccttcaatccatttctgggcttgttcatctgccataactgttgtctgaatggtattgttatcagcatcagcggcgaaatccatggtgaaacgtgctttgccattgaaagagatagtgtattttacagtgtcttctttcaggtaatcttcattgaatgcaggccattgtgcatcgcatacgctggtggtatttcccaaagcttcccaaagttcttctgcataatgtggagcgaacggagctaacaggatgatgagattgctcaatacctctttattgcgacatttcaatgaagtaagttcgtttacacaaatcatgaacgcactgatagaagtgttgtaagagaaagtttcaatatctccggttacctttttaatcagcttatgaattgctttcaactcttctttagtcggttcaccctctacaggcaagaattcgtctgtgcggctatagaacagattccacagtttcttcaagaaacggtgaacaccgtcaataccattggtatcccaaggtttggactgttctaccggaccgaggaacatttcgtacatacgcagcgtgtcggcaccgtatttctcgacaatcatatccggattgactacgttgtacatggatttactcatcttctctaccgcccatccgcagatatattttccatcttccaggataaactcagcatcgttatactcaggacgccatgctttgaaagcttctacatccagaatatcgttggatacaatattcacatccacatgcagcggagtggtttcgtactggtctttcaggttcaatgacacaaaggtgttggtgtctttgatgcgatatacaaaattgcttcgtccctgaatcattccttggtttactaatttttggaatggttcttccttgatacttacgcccagatcatgcaggaacttgttccagaaacgagaataaatcaagtgacccgtagcatgttcggtgccgcctacatagagatctacattttgccagtaatgatctgccttttctgatactagtgcttgtgcgttgtgtgggtccatatagcgcagatagtatgcggatgaacctgcgaagcccggcatggtattcagttcaagcgggaatatagtgacgttgtcaatcaagttgttttccacgacttcacctttttctacatcccaggcccacttggtggcatgtcccaatggaggttcgcctgtttcggttggcaggaacttagctacttcgggaagttcaagcggcaatttagatgagtcaatcatataaggcataccgtttttgtaatatacagggaacggttcaccccaatagcgctggcgtgagaagatggcgtcacgaagacgataattcactttcacgcgtcccaaattgtgggctttcacatattctttggtagctgcgatagcttctttgatggtcagtccgtttaaagaaaggtcacaataaggagtgacatccttgcggggtgagttgcaaacaataccttctttggcatcgaaactttcttcacttacatcacaaccttctaccaacggaacgataggcagattgaaatgttttgcaaaagcgtagtcacggctgtcgtgagcaggaaccgccatgatggcgcctgttccataacctgccaatacgtaatcactgatccatacgggaacagcctcgccggtaaacggattgatggcgtatgagccactgaatacaccggtaacgcggcggtcggcgatacgttcacgttccgtacgtttcttggtgcggtccagataggcttccacttcggctttctgtgcttcagtagtaagttggggaaccagttcgctttcgggcgccagtaccatgaaggttacaccgaacatggtatctgcacgggtagtaaagatagtgaattcaatatcactgtctttcactttgaattgtacttccgtaccttccgagcgtccaatccagttacgctgtgtttctttcagtgaatcagtccagtccacagtgtccagtccgtccagcagccgttgtgcgtaagccgatacgcgtaaacaccattggcgcatttttttctgaacgacggggaaaccgccgcgttccgaaactccatccaccacttcgtcattggcaagaacagttcctagttgcgggcaccagttcaccatggtttctcccaaataggcaatgcggtagttcatcaggatttcctgttgttctttttcgcttttggcattccattcttcggctgtaaagctgagttcttcgctgcaagctgcattcagtccttcgttgccgtaccgggcaaatgcttccgttagttcgctgatggggcgtgcctgctgtgtatcgttacaataatagctgttgaacatttgttggaaagcccactgagtccaatggtaatatcctggttcacaagtacgtacttcacggttccaatcaaaagagaagccgattttgtccaactgttcacgatagcggttgatattgttcacagtggtgatggcagggtgttgtccggtttgtatagcgtattgttctgcaggaagtccatatgcatcatatcccatcggattcagcacgttgaaaccttgcaagcgtttgtaacgggcgtaaatatcactggctatgtatcccaacggatgtcctacgtgcaatccggctcccgacggataagggaacatattcaatacgtagaatttctttttgctttcgtcttcagtcacttgataggtatggttctctgcccatctttgctgccatttcttttcaatctctctgaaattgtattccatgatctattttttgttatttaatatctttgttattaagtgattgcaaagataatgaaagtcggggagatatatggaaagaacagaaataaaaaacttcttgttatgtatatagatttctttttgatgacactttttggaggaatatataatatatatacctccaaaaattattatatttatttgtacaaatagcaattgtacgatataggcggtaagattagaagatttataatgatgcagccgaaagaactataatctttcggctgcatcatttatatgtttaatttacgggctttttattccactcccaaatctttataagttctcggagccggaacagaaggtaacggtttgcgatccttcagctcttgtagaattacttcaatagctttattcaactgctggtcttcacctgactgttcttttaccggatcattatcaatcagaatatcagggtccactccatgattttctactatccattgaccggtctttgcatcataattggtaaagaacggaacacgcacatccgtaccatccatataaggtaacggaccactgataccgacaatgccaccccatgtacgagtaccgataactttaccgattttatttgccttgaaactccatgggaacaagtcaccgtctgaagccgagtatttattgatcagcaatactttcggacccactagtgttgcatcaggaatggtaccgattttagttgatccacgacgcatggtcaggcgatagggttcacgaagcaaacgttcgataatcattggagatacattaccacctccattggcacggtcatcaataatcaaggcttctttatcgagttggggatagaagtagcgggcgaattcattcaggccgtccggtcccatatcgggaatgtagacatagcctacacggccattagttgcttcttccacttttttgatattattctgtacccagttataatgatacaatgggtattcattgtctaatggtttaatgactactttacgtgctcctttacttgatgcggtacggtttatgcttagttcagtcaagacattggctttgcctgccagcagactgtaaatgttatcaacagtagctgttgaaatgccatcaatagctgtgatataatctccttcttttactccgatacccggttctgtaaggggagaacgcagtttctgactgtaaattgcacccggtagaattttgtcaatacggtagaaaccactcttgtcacgactcagttcagctcccagcaatcccattggaatacgttcgggaccttttatttcacccggattcacataagcgtgtccgcaagccagctcggcaatcatctcaccgatgatatagttcaaatccagacgggtttttgcatggggaactaatacagcatatttttctttaattcctttccaatctgctccatgcatattttccagatagaatccgtcacggaaagcccgccatgtttcatcgaatatctgagcccattcctgactgtagtcaatgggagcaatcatgtcatccaagttgacgttctcttccaatgaggctttagtgcatggaaaatcacagatatacagattatttcctttaaagaacaatgctttcctatgattggcagctacatccatatatgctccttcggccacggtttcttctttttgttcggtcaaatcatatactttggtacttctaccactggcataccacacttttttaccgtctgaatagaaattatcgtagttacctgcttgtaaaggcagtttaatcagtcttccgagcaagccttccggatcaattttaactgcattatttgtggcttccgtttttttattgacagcatcagttgcctgttgttctatgctgaccatttcatccgaaggtaataaaggtgatggcgtatcattggcgagcatggccatatagactcctcccatacgattataggcatggttccactctgtctggctgtaaatgggattaaagtccctttcagaattgaatatgaggtactttccatctgtgctgaaaacaggtgaagaagaattgtaccatttttcggttaccggatattccttacctgaagtcagatggtatacataaatgacactcatgttattagctccggatttagtataggtaatccactggctgtctggtgaatagtttacttcatagaactctccttccggattctgcatgacagtccgtttcgcttttgaggcaatatcaacttctacgatacggtttttacggtcggtataaagtattttcttgctgtccgggctccacatcagttggcggatataagtatcattgttttgggtcagttggatgggatcacccccttcgacagattgcagccagatttcagtttcaccggtacggtcactgatataggctatttgtttaccgttcggactccattctccttcccgttcattggctcccggggtgcgggtgatatcacgggttacccctttttcggcagggacatcgaatacctctccgcgggcagttactgccaggcggtgcccatccggtgaaagactggcggcagtcaggttatctgctacccgtttcatttcttttcgggcatagatattgtctgaagtcagcgtgatggagattttttctgatttgcgcgttttaggatccagtttatagaggtatcctccatgttcgtagacaataatttgtccgttactgctggggaattttacatcataatccgtatagttggttactttttcagtttgtttggtccggatattataaacaaagatattcatggtgcgatcccgatcggaaataaagtagatttcctctcctatccacatagggataatatcttgtgcaatattattggtgatattctctactttcttggcagccggatcataaatccaaatgtcatccgccatgccaccgcgataatatttccaattacggaattctcgcataacccggttgtaagccagcttttttccatcgggggaatagctgcaaaaacctccttcgggtaatggaatcacttcggacattcctccgtttttcgatatactccacagcttgccatcgaaaccgtcactgatacgattgcggtagactatgtttttcccatcaggtgtccaagtcattacaatgttattgggacccattcggtctcctaagtcatcccggctgtttgttgctgtataggtaagccgttggggttcgcctccatcggttggaatcagatatacttcagtgttaccgtcatattgaccggtgaaagcaattgattttccatccggagaaaaacgtgcgaacatttcataaccgatatgagaagtcagcttttgtgcttctcctccattcaaaggtgctttgtacagatctccggcgtaagaaaagacaatgtcggagccattggtagcggggaaacggagtaacctagcctcatcggcatgtccggtgaaagctgttcctgccagtaacagggagaataatagctttttgttcattttatttagggtttgattttcgtcggaaacaaagttaggtattattatttagattataagatggtagttgtctcttttttacgtaaatttgtcatctgtcctgattaatgaactaacttaatgatatatgttatgaaaaatcgaaacctctttcttttaaccagtggattagcatttcctctattaggtgcttatgctcagaaaactcctaaaccgaatatcatttatattatgtgtgatgatatgggttatggtgatttagggtgttacggtcagccctatatcagtacaccgaatattgataatatggctaaggaaggtatgcgttttacacaagcgtatgccggtagtccggtgagtgctccatcacgtgcgtcatttatgaccgggcaacattccggacattgtgaagtacgtgggaacaaagagtactggcgcgatgcccctgttgtgatgtatggaaataataaggaatatgccgtggtggggcaacatccatacgatcccggtcatgtgattatacctgaaataatgaaagataacggttatactaccggtatgtttggtaaatgggcagggggctatgagggatctgtgtctacgccggacaaacggggtattgatgaatattatggttatatctgtcagtttcaggctcatttatattatccgaatttcctgaaccggtatagtaaatcggctggtgatacggcagtggttcgtgtagtgatggatgagaatatcaactatcctatgtttggtaaggactatttcaaacgtccgcaatattctgcggatatgatccatgaagaagcaatgaaatggttggataaacaggatggcaagcaacctttctttggtatttttacttatacgcttcctcatgcagagctggcgcagcccgaagattctattctgacaggttatcaaaagaagttttttgaagataaaacttggggtggacaggaaggatcaagatataatccgtcggtacacacccatgcgcagtttgccggcatgattactcgcttggattattatgtaggagaagttttgaacaaattaaaggagaaaggactggacgaaaataccattgtgatttttaccagtgataacggccctcatgaagaaggaggagctgatcctaccttttttggtcgtgacggcaaacttcgtggattgaaacgtcaatgttatgaaggggggattcgtattccgttcattgttcgttggccgggtaaagtacccgaaggaacggttaatgatcatcagttagctttctatgacttgatgcctacattttgtgacttggcaggtgtgaagaattatgtaaagaagtacactaacaagaaaaaagatgtggattattttgatggtatttcttttgctccgactttgttagggcaggaaggacagaagaaacatgatttcttgtattgggaatttgatgaaaccgatcagattggtgtacgtatgggagactggaagatggtagtgaaaaaagggactcctttcctttacaatcttgctacagatattcatgaagaccatgatattgctgccggacatccggatattgtaaagcaaatgaaagagattatcaagtcacagcatacgccgaatcctaatttcttcgttactttgccttcatttgaataaatagattttttattctgatattttattaagtgcggcatttttgttttaaactctatatttgaaacaaaaatgccgcagattatttattcggagtaattattgcagtgtcagcgtctttacttgtaattcggcatctttagaattaccccctaccattatatcgaaatttccggctatggtgcgcatggtatttgtctgcgcgtcccaccattccaattgtttgggtgttaactctaattctacattgactgtttttcctgcaggaatttgtacacgtttgaaagcacgcagtgttttaaccggtccttccgcatcttcttgttttttcagatatacctgtactacttcttccccgtcacgattaccggtattggttacaggaacaataattttggcagtttctcctactttaatcgtttgctccagtttgatgttaccatagttaaaagtggtataactcaaaccataaccgaatgggaaaagaggatcacctttaaaataacggtaagtacgtcctgtcatattataatcttcaaaatcaggtaattgcgttatgttccggtaaaaagtaacgggcagtcgtcctgcaggattgtaatctccaaacaaaacttcggcggcagctttacctccggattgtcccggataccatgcttgtaaaatggcctgacaatatttggtttcgggctccatggcaatgggtgatccggaaaaattaacgaaaataacttttttcccggcatcacagagtgcttttatcaattcacgctgaacagccggaagttcgatgtcagtacggtctcctttgcggaatcccggtaaattgacacccatctcctctccttccaaacttggagatataccgcctgcaaatataactacatcagcatctttcacttttgctaccgtgtttttaatgttgacttcttctttaaatccaagatcgaaattcaactgtgcgtctccactaaagtattggaagcggatttctatatcgtatggcttgccggcttctgcatgcatggcgtaagcttgtcccctgcccccatgtttgttggtgaatttctttacttcttcaccatttatcaataattgtgtagctccacaactatagaagttgaaaataacctctcctgtttcctggggggtgaacacactttgatagacggccgagaaatcggtcaggttcacaccgggagcaaatacggtggctccggaagtgcaaagacggaacggtgtggtaagttgtgcggtggctaccgcatttccttcatattccttgttgttccaatagtgggcggagaatcctggaccttctttagaagtacactggctgaaaacgcttctgattaatgagcgctccacccagctgcaaccttgttcatagatcagtttgtcgttctctcccatggctgagcggataccttccaataaggtgatcgtatgtttgggagtaccgttataattaccccattgcatcacagaatcatttgcgttaggtcccatgacggcgatggtttgtccaccgcgtttcagtggcaggatattatttttgttcagtaacagcgtcattgatttgcgtgctatatctagtgacagggaatcatgttctgccgagcaaaacactgaataaggaattttagtccattccactttgtcaggatcatccatttcccccaattcaaagcgtgcttttaataatcgttttacggatacatcaatgtccttttcactgattaatccttttttagcgctttctaccaatgctttataactggaaccacattccagatccgtaccgcttaatactgcggcggcagaggccgattcagcatccggatgtgttttgtgtcctttttcccgatagaaatcgtcaatagcgccacaatctgaaagtacaatgccgtcatatccccagtcttgacggagaatttgcatcagcaggcggtcacttccgcaacacagatcaccttccaaacggttataggcacacattacctcctttacttttgcttcttttactaatgcttcgaaaggtacaagataagtttcatgcaagtcacgcggtttgatattttccgcattgaactcatgacgattccattccggccctgaatggacggcaaagtgtttggcacaagcgtgtattttatcgtatttttgattagcatccatgcattgcaatccttttaccacatttacccccatgacacttgtcagataaggatcttccccatacgtttcaatacctctcccccatctgggatcgcgataaatattgacggtgggtgtccacatggtcaggccttgataccgttcgtagcttcccgccgccgagtatgcggcatttttggcccgggcttcatccgaaactgcggtatagatggtatgtatggcatcgggctcaaaagaggccgccatacctataggctgaggaaagacggtggccagtccgctccgtgccactccgtgcaaggcttcgttccaccaattataaggtttaatgcctaatctttcgacaggtttggagttgtccatcattaaggcaactttttcttctagagtaagttgttgcaataaatcctctgcccgttcttcgggagataaactgctgtctttataagccggttgattgttacagccgcttagcatcacaagggaagcaaataaatatagaattttgtttctcatagtaaaatggtaaaaatgattagttacacggcaaaaatagaataattatgaaaaaagtccgtgtattttttgattaaaaaggtggaagatattgttttttatacaaaaaggtgggatagatataaaaagtttccggccggatacatcgtaccgaccggaaacgtatgagatacagcaaataatgactatttatattctgcccaatctatcaggcgcatatcccctttcttggccagcgtatcatgcatagccaatgcagccggaatacaatgaggagtttgtcctttggaagacatttttacataatcccaaagaatgttcttataatccggatgtgcacaattttcgatgatagccttggcgcgttctaccgggctcttgccgcgtaagtcggcaacaccttgttcagtaataaggatattgacatcgtgttcactgtgatcttcgtgagaaaccataggaacgatggcactgatttttccttcttttgccacagacgggcaagtaaagatggaaatataggcattgcgggtaaagtcacctgagccaccaataccattcatcattttggtgccgctgatgtgagtagaatttacattaccgtaaatatctgcttcgatggctgtattgatagatataacaccaagacgacggataatttccgggttgtttgagatttcagacggacgcatgaccagtttgtcacggaagaagtcgatatcatcataaataccttgcagacattcgttggtgacagtcaatgaacaggtacttccaaattttacacgtccttggcgaatcaggtccaccactgcgtcttgtaatacttccgtatacatttcgaaggcgggaattgttttgtctcgtcccaaagcacccaatacggcattagcaatgttacctactccactctgtaatggcaggaagcttgcaggaataataccccgtttcatgtcagctgccaggaagtcggcaacattttgtccaatctggtcggtgataggatccggtgcggtaaatgaacgggcctggtcaggggtgtttacttccactacgccgatgatttttttcgggtctacctgtacataaggcagaccgatacggtcgctgggtttgtaaataggaatttcacgacggtaaggcgggtcaagcggttcataaacatcgtgcaggcccataccgtttttactgtgggcagcgttcaattcgatgatcactttatctgccagacgtgcaatagtcggtgcaattccaccggcggctgtcagataaactttgccgtcgggagtgatttcacacgcttccagaatagcgacatctactttacccatgaacccgtaacgtacctcctgtgccatttgtgacagatggatatcgttgtatgctatttcgccgttatttacggcttttcggaaatcggggttggttgtgtaaggagcacggtaacggattgccttgaccctggataagatgccgtctgtagcatctcctgtagaagcaccggtaaagatactaatttgaaaagggttacctttggcatgttcttcttctgctatttttgcgacttcgggtgttacggctttcggtgttcctgccggagtaaagccgctgagtccaatgttgtagccatgcttgatatagctggctgcttcggctgcggaaataatattaaatcccatgatattcaatgtgttattcttattagtatagttgttattaatatttgcgattaaaaatctctgaataaataaaagcacgtcgtgcctcttctttagtactcagtcttataggagtccggtcttcccttttgttctctttccggggtgaatctgttggtttcttgaccatcggctgatgctgcatgcggggagtctgaggtgtgcggactgtttgaacggaagaaacaggaaggtcctcctctatgttctcctgctctatttcaggaaatatatctgcaagcactttctttggagaaggtgttttcttctctttgcctgtttttgagatttgttgcacgatggctgcaacaatgattattataaatatgataacctgaatgatatccatactttccttattatataatgaatgctcaaagttagaaaaatatttcataactaactctataaaagggcataaaaaaaggaagagaacttcacagttgtcttcccctatttttttaacctaaaccttaactatgaaaaaatctaatgtttttcggaagcaaatatgcgaattataataatacgttggtaacgttaacggttttttttgttcactggttataattatttaacagttaaatgcataattctcttataatattcaattttcggctcttttattcgtttaatttgtcggtaactccgtatctttgcctacgaaaccataaaacagagaaaatatgaaagaaacaacaggagcagactttaaatctgcaactgattccgaaaacaagaaattgtttattgaaacttacggatgccagatgaatgttgctgatagtgaagtgattgcttctattatgcaaatggcaggctaccatgtatgcgaaacattggatgaagcggatgctgtatttatgaatacctgttccattcgcgacaatgcagaacaaaagattctgaaccgtctggagtttttccattctatgaagaaaaacaaacgccggaatctgattgtcggtgtgttgggctgcatggcagaacgtgtaaaagatgatttgatcgagaaccatcatgtagatcttgtcgtaggaccggatgcctatctcactttgcccgatttggtcgcttcggtggaagcgggggagaaagccattaatgtggagctttctactacagaaacctatcgtgaggtaattccgtcccgtatttgcggcaatcatatctccgggtttgtatccattatgcgtggttgcaataatttctgtcattattgtattgtaccgtatacccgtgggcgtgagcgcagccgtgatgtggaaagtattctgaatgaggtgcgtgacttggcagacaaaggttataaagaagtaacgttgctgggacagaatgtgaattcttatcgttttgagaaagagggtgaaataattactttcccgatgctgctccgcacagtggccgaggcggttccggacatgcgtgttcgttttaccacttcacatcccaaggatatgagtgatgaaaccttgcaagtcattgcggaaacgcctaatgtatgcaagcatattcatttaccggtacagagcggcagttcgcgcatattgaagctgatgaaccgcaaatatacccgtgagtggtatttggaaagggtagcggctattcgccgtatcattcccgattgtggtctgagtactgatattttctccggctatcattcggaaacggaagaagatcatcaggaatctctatccttgatgcgtgagtgtgcgtacgattccgcctttatgtttaaatattccgaacgtcccggaacatatgcttccaagcatctgccggatgatgtacccgaagaggttaagatacgccggctgaatgaaatcattgaattgcagaaccgtctttctgccgaaagtaatgcccgtgatgtaggcaagaccttcgaggtgatggtagaaggtgtttccaagcgttccagagagcagctttttggccgtacacagcaaaacaaggtggtggtctttgatcgtgggaatcatcgtatcggtgattttgtccatgtacgcattactgaagccagttcggccacattgaaaggagaagaggtgttctgatggggagaaaagaagaatataaggaaaagaacttgcaatatttgcaagttctttctacacaggaaggtatttgtcctttaccttgtaatatgttttataaagtattgcagacaggtacgggtacagtttcacctacaatccgaagtattgtcaccgttcattatcggggaagtctgataaacggaaaagagtttgataattcctatgaccgtaactgccccgaagctttccggctgtgtgatgtcatagagggatggcagctggcgcttcaacgtatgcatgtaggagataaatgggtggtttatattccttatactatgggatatggcaaccgtacaagcgggccgattcctgctttctctacattaatatttgaggtggaactgctgggcattgcataatgcctccggttatcggttatgcagtctgtcattcatccggtcttcgtaaccgtcacgatatttcttttcgggcataacaatccataagattatatagacaataatgcccgaaaaggctgtgaaaaccgtggcaaatgaatagataatgcgcactaccgtaacatcccagccaaaataatcggccagtcccgcacatactccggctagcattctgttgttggaacgggtcagttttttattttccattttcgtttctttttaagttatctgcacaaatgtaggaaaagtaaaaacgaattattaacttatactcttaaaagtacttaaaggatagtccttctcattcaatttatttgttattttgcagcaaattagggcaaaaagtggatatactcaaaataaatacttgtccgttgtgcggcggaaaacatttgggacatgcaatcacttgtacggatcactatgcttcgggtgaacaattcaatttggttcgctgcgatgattgtggctttatttttacacaaggtgcacccgtggaagccgagatagggcgatattatgagacccccgattatatttcacacactgatacccgcaaggggctgatgaaccgtgtataccatgaggtacgcaagtatatgctgtcacgcaaagccaagctgataaaacggacatccggtttgagtaaaggtactttgttagacataggtaccggtaccggatatttcagtaatgctatgaaggagcgcggatggcgggtgaaagcgatagagaaaagtccgcaggcgcgttcgtttgccaaagagcattttgaattggatgtagatacggaggatgctttggcgggatatgccgatcattcttttgatgccataactttatggcatgtgatggagcatctggagcatctgaatgaaacgtggaagaaattattcaagctgttgaaagagaggggagtattgatagtggctgtgcctaatcccagttcgtatgatgcggaaaagtataaggaatggtgggcggcatacgatgtgcctcgtcatttatggcattttacaccttccgtcatgcaacaattcggtgtcaagcatggttttaaattagcggaacagcatccgatgccttttgatgctttttatgtatccatgttgacggaaagatataaaggcagccgtttgtcctttttgaagggaatgtggacgggcctgttggcctggttcagttcactggcgaaaaaagaacgcagtagttcaatgatttatgtattcagaaagaagtgattatgggaaaaaaatcagggtcctttttcgatatgcagttcattacctccagcatcagtacaatgctggtgttgctcttgttggggatggtggtattctttgtgctgtctgccaataacttatccaagtatgtacgcgagaacatcagtttctccgtactcatcagcgatgatatgaaagaagcggacgctttgaaattccagaaaaaattgaatgaggaaccttttgtgaaagaaacttcctatatatcgaaggagcaggcgttgaaagagcagagcgaagcgatgggtacagacccggctgaattcttgggatataatccttttacagcttctattgaaataaaactgaatgccgattatgccaattcggacagcatttcttggatagagcagaaaattatgcagaacaagaaagtaatggaaatcaactatccccaggatttactggatgcagtgaacagcaatatacggaaaatcagttttttgctattgggactggctgcgctgcttacccttatttcttttgcgctgattaataacaccatccgtctggccatttattccaaacgttttctgattcataccatgaaactggtaggggcaagctggggatttatccgtcgtccttttttggtgcggaatatatggatagggatactggccgctgccatggcagatgcggcattgataggaatggcctatgcgttggtaagatatgaacccgaattgattgagattattacccctatgaccatgcttatggtaatgggttctgtttttgtgtttggtgtggttattacctttatgtgtgcatatatatcaatcaacaaatacttgcgcatgaaagctagtgcgttgtattacatttaataataaaaggatatggatagacaaaaattcgcctttgataaaactaattttatattgcttgccataggtatggcagtgattattgtcggttttctgctgatgacaggacctagttcgacagaaggatattttgagccggatatttttagtgtacgtcgcatcaaagtggcgcccgcagtatgtttctttggctttatctttatgatttatggcattgtccgcaagccaaaggacaagacagaagtggttaactcttgatttttttaatttttaattctcaatttttatttaaagaatggaatggtttgaggcattgatccttggtgtgctccaaggattgacagagtatttgccggtcagcagtagtggtcatctggctatcggttcggcattgtttggcatacaaggggaagataatctgacttttaccatagcagtgcatgtggctacggtactcagtactttggttatattatggaaagaaataggctggatattccgtggcttgttcaagtttgagatgaatgcggagacaaaatatgtgatcaatatcctggtatccatgattcctatcggcattgtgggtgtgttttttaaagattatgtggaagaaattttcggttccggcttgctcattgtaggttgtatgctgttattgacagctttgcttcttgctttctcttattatgcaaaacctcgtttgaaagagaacatcagcatgaaggatgcgtttattataggtctggcacaggcttgtgccgtgatgccgggattatcccgttcgggtactaccattgctaccggtttgttgttgggagacaacaaggcgaaactggctcagttctctttcctgatggtgattcctcctatattgggtgaggcgttgctggatggtatgaagattgtaaaaggagctgcagccggcacatcagatatatctgtattgtcattggttgtaggttttctggcagctttcatatcgggctgtgtagcttgtaagtggatgattaatattgtgaagaaaggtaagttgatttattttgctatctattgtgccatagccggtgccgttacgatagcgtgcacattgatgtaattggatgaattttaaagaaggagaagtattatactttgataaaccgctgaaatggacctcatttgcagtggtgaacaagataagataccatatttgccgcaaactgggcgtgaagaaaataaaagtgggacatgccgggacattagacccgctggctaccggggtgatgattatttgtacaggcaaggcaacgaaacgcatcgaagagttccagtatcataccaaagaatacattgccaccttgcagttgggggctaccacaccttcattcgacctggagaaggagatagatgctacctatcctacggaacatatcacccgcgagttggtagaggaagccttgcagcgttttatcggcaggatagaacagattccgcctgttttctcggcttgtaaggtagatggtaaacgcgcttacgatttggctcgaaaaggtgaggatgtggagttgaaagccaagacgttgattatagacgagatagagttgctggaatgtaatctgcctgagattaaaatcagggtagtgtgcagcaagggcacttatatccgtgcattggcccgtgatattggcgaagctttgaatagcggtgctcatttgacagggctgatacgtacccgggtgggggatgtgagactggaagactgtttgtcggtggaaagttttccggaatggcttgaccaacaagagattgaagaagttataaacgaataaggagagataagatgaaactgtcgcaatttaaatttaaactgccggaggataaaatagctttgcatccggctaagtatagagatgagtcgcgcctgatggttgttcacaaatcaacaggtaagattgaacacaaggtattcaaggatatcctggactattttgatgataaagatgtgtttatctttaatgatacgaaagttttccctgcgcgtttgtatggaaataaggaaaagaccggtgcccgtatcgaggtatttttgttgcgcgagctgaatgaggaacttcgcttgtgggatgtgctggtagatcctgcccgtaagatccgtatcggtaacaagctttattttggtgacgatgattccatggtggccgaagtgattgacaacaccacttcccgcggacgtaccctgcgtttcctgtatgacggctctcacgacgagttcaagaaagcattgtatgcgttgggagaggctccgctgcccagtttcatccgtcgtccggtagaagaggaagatgccgaacgtttccagactatctttgccaagaacgaaggggctgtgacagctcccactgccggacttcatttcagccgcgagttgatgaagcgtatggaaatcaaaggtatagactttgcttttgtgacgatgcatgccggactgggtaatttccgcgagattgatgtggaggaccttaccaagcataagatggattcggagcagatgtatgtcaatgcggatgcgtgccgtattgtgaataatgccaaggatgaaggaaagaatatttgtgcggtaggaacgacagtgatgcgcacgatagagactgcggtaggtacggatggtcatctgaaagaatttgacggatggaccaataagttcattttccctccttatgatttctcggtagccaacagcatggttactaacttccacctgcctctctccactttgctgatgctggtagctgcctacggtggttatgatctggtgatggaggcttatcacacagcgttgaaggaagattaccgtttcggtacttatggcgacgctatgttgattttggataagtaataccggttggagcagcgtatgagggtttatttgggacttggaaccaatctgggtgataaagaatcaaatctgcatgttgctgtccggaagataaatgagcggataggggaggttactgccctttccgctttttatgttaccgccccttgggggttttcttctgaaaattcttttctgaatgctgcctgttgcgtggagagtgtgcttcctcccttggatatattgcgggaaacacaggagatagagcgtgaattaggccggatgaagaagtcggcgggaggtaattatagtgaccgcctgattgatatagatattttgttgtacggcgatttaatactgcatacgccggaattggaaatccctcatcccctgatgactgaacggaggtttgtcatggacccgctggcggagattgcatcggatgtggtgcatccggtattgggaaaaaggctgggggagctttaaacctgtaagagtatattaattaaaagaggacggaaaattcttcaaatccatcattgtggtgtagatagctgattgatagtgtattgttatgaaggattcgtaatagaatccttcataaatgtttcagggaaatatgtccagtatggaataatctctccaaatttcttgtgtggtgacgctcgtcactccggaatcagggtaacgttggcaaaattcttctgttctgtcttctcgtataattaggaatttgtttttgtagctcacttcgtatccatatttttttattatactttgggtttgcatgatgagtgagtctactctacatttgtaggtcccttcatatccttttctcccatcgggaaaagtcatggtaaatagtcgggtctggttgtcgaatgtatagcgtgtaccgtttctgtttttcagttcctgcatcagttctttttctatattttgtttggtttgtgtgtcttgtgcttctactcgtacttccggtttgacataaggatgagctccgttttccacttccacatccttgcttccccacatggtggtttgtatttttattatttttaccagtttgttattcttgtccagcacatgtatagatgattctccttcgcaaagtggaaagatacatacgacaccgaaatgttcgattccgaaatattccgttttcagtttttctggatcgttgttctttattgtgtaaccatttgtttgttcgcccaaggaggcattgaatggatggcctacgtaagctttgtattcactcacaatatctgttccttcttccggttccggagggaggatttcttctttgtctgagcatcccgataacagtgtcagacataatactagcgttagtgtcagggcgtgtattacgtcctgactgaggttatttcttttgaatgtcatagatcatttgttgttcttgtgtataatatacaatgtttacgtcttctgtatctgtgtggaagattacatcacagtttataccgttgtttgctttaaaatagacggccgaagaaccttttccccatcccatgttgacagaccaatataaatcactatttggtgaactcgattttttggtagtacagtatccgtcaataatccaaccatgacccggtttgtctttgtatggatcttttgtgatagggagacgattgttgtcaacatagtgtccgtttccataaagaagtattggattataattttgtaatgactgtttagccagttccggattgaatcctgtgcttcctgagtaggtagtcattgtttgaagatattccaacatgccttccgttggggttgaggttgaagcgatacctctttttataattgggttattgtcctcgtcataggtattaaaatctacatagttaggaaatgagcgagttttattgtatatagctcttaacaaactggcagtcatttcgattaaatcaggtgagctgtagtatgtaattgttttttgagcggtcaggtagtcccaatctattaaaatttgtctacctgctgctgtttctcccaccatgactggtttcagtatactgaataatgtagcaaccgctatatttccacatcccactaaataatgcccctgatatgttcccatatgcccgtcccatatatttcctatgggcatttgatcgttgtaaggtgcttcttgatgccatacaatatctgatatgggaggtaccatagatacaattcgtgaaggaattttgcttatatcaatgccattgataggattatattctcttgaattgctgttatcaataatagtaatatttctttttatgatgtcttctgtaatttgttccttggatatatttagggattggctgattttgtcgagagtggaacttcttttctctgatttaagtttttctatatatttaatatctgaaaggatatttagttttgctatttcaaccaaatatctcatatctatgttcataggttgggaaaattgatagttctctgtaaataacagaactttcggtgctctttcatcaccacaaacaattatcatatcttttgttccgctattattagttagttcaacttcaaatataggtacatttatttgaatggagtctgctgaacgggagtgattcctgctgtttgtaagataatatttattaataatggaaatcttgggcttgtcttcttttgttgtaatgaattgttttttaaattctgaattgatacgtttaaagtcgtaaattacatttgtaatctcgtcttccgatagttctttgggattatcatacgctatgctggcgtattcattcgatgtcaaaaccacttggttggttgggttgttgttaacttctgtattttctaatttatcagtacacgatataagaatagatgttatcaatatgagttgtgataatataacctttttcatggcatttttgttaatgattgaatgataaaactggctaaaaggttgcgttattgatatcttttagtcagttttgatatatgaaaattatttttttctgaagtctgccattatggtcatagcattgtctttgaaaattagtggaatggcagtttcaaaagttattgtcgatgtttttatatccattaaatagtagccatcctgataaccgtttccgaagccaaaattagcgtgtaaatagcatacgtccacatcggaaggaacattgtctatcctaccatagcattcttttattccatcaagaatgaatggggtgactccatcggtagctatattgtcaggtttgccgtatattaatacaggtttagttgcttttaaggaattcttgacagtattgatattccatgatgtctttttgctataattgaagtaacttgccaaataattctccacatcagacattaaacaagttgtccccgtaacaattccttttgagtctttgactacagaagattttgtataatcatagatatttttgaatagcctgcctaccatttctcttttagctaaaggatcaccggagttaaaataatctggtgctttgatttctttattttcagtcaaataactccaatttatttgtaggctggctggtctcatcgttggctccaaactagctagaatatgcgctaccacaattgctccatagcctacaggataatttgtatattctgaccatcccggaccatacctatcacaattggcttttggtaacatacaattataaggttcccattgtccccatgccacaggacacataggaaatactgcaactttgacctttagattggaaggaacttctgttataggtttagagcggctgatagagctgttgtttatgataatttgattcttgattgcttcataatcgatgtctttggatgttatgtatagttctttggatattttcaaaacagcagattcatacaatgaatctttaatctcatcaaatttggtaacttcattgcggatgtacatttcgctccattgaagcaaagcgttgggacttgtgtaaagagaatcctggttttccttgatgttgtctatatatgcaaggatgtgtggggctcttctatctcccgaaacaacagccattcctgtgcctgtttctgatgtgaattctattttatagataggtatttgttcctctgtactttcaatattcctggcatctgctttgtttttagataaatagtatttctcttttatctgaaagatgttaggctgaaaagtaatacgtgaatgggcattattttttagttcactgctttggaaggttgtcaataaattgaatacctcagtttggctaagttccggagaacttttgtatctgatgcttaatagctcttctggtgatagttgtacttccttactagggggtgttatatcctctatttcatttgattggcatccggcaatcatcaatgaaagggataataaacagaaaatgattttctttttcatcttgtttcttattgttagttctgtaaacctatatttttacttagcacggatattttttatgcaatccattttataacaccattcctttacgcctcctgcttcaaaaaaggttcttgcgtttccgtctagttgataataccctgtgtttttatcagcccaccccaaatttgcgtgccaatataaatcattcgtcttaaccatttggcgagtttgactagctttttcggtgattagaagtccggaaatgataaaagcatggttcgtagttagcataagcaccggattgttatttcttaatgaggcccaaacttgatcaccatcaaaaggggcttttggattatatttaaaaaatttgttcatcgtatttagcatattctcttcagaaacaccactttcaagtacagcaccatcccaatcttttttggatgtagttttattcatattatagaagttgagcataaggtattgaacttgcatttgagcttgcccctgtaaatcattgatagaggctttttgggtcattttaataaagttaggcatataagtcatagtactgttgggtaaagtaaaggtaagagggggagtatatttttgatgagtatatcccattatttgagcaagtgccacattgacacatcctacaggaagtgcgtccattttctttccattattttcagttcttatccaatctactttattttcttctctgaaagcccaattatagggatcgtcttgtccccaattggtcttgactagaggagatattgatgatggtagtttttgtattccctcgggaggaccttgtacagcagttgatctagatgaataggtatctgttaaaatgatattatcttgaattttttggtagttaatttcattgataggaatgtttaatttcttactaattttctccaacgttggctgttttagcgaatctaccaattcttttgttttaatggctttataaagatagctggcttttgctgcatataatagttcgtttgctccgctcagttgcattgcatcatcattgcctttattgggaataaatgctataatagaaggaagttctgcatttgtagctactacagccaacccatttacagtatcgttttgaaattcaacttcacaaatttcagatatgatatcatcttctggtaaggcggttcgggaagctatttctttattttgaaattctccttctttatttatatatgttctttttgtaatcttaaatgatgcactagtgcttctgcttacaccattattattcatattggcaaaagaacttaccatattgaaaatatctttgtctgtaagctcttttgcatcatcgtaggcgatactgaggacttcgtttttattcaacttaaccttttgggaattagtagaaaggttattggtgctttcattcgagcaggagaataatgtaattcctgcaaagaatagtgataatggaatgattttcataagtttgttattagaatattatgtatgagattagttttcgtatataaattctcctgccaatattcccttttcatcggtgattgtcagttcatatattcctgccggaatattctctaaagaagttgataaagaagaattggagtggggtatatagaggtttctatatactacatatccttcttttgatttaatctcgatggttaccgcttcccagtcctgtgcgaattcgatggttaattctttattgcagtcgtcaaagaaagcttttaccggaatgaatgactctactggaattctatggttgccatgttttataaattctatatttcgttttttagcgcatagtaatagaggaataattaaggctatcaaagccaaactcatttttaatttgttcataatcgttttacgttttagttttgtgcaaacttaggtattataggattatgaatgacaaaaagagggagttatagtatatacaagatttgttgattatcagcgagttacaaaaattgttatatacagtgatgtatatgtagtgttttataattcactgataataagatctgtatgagaactatttattttaagaggtttttgatgatgtaatctcgtaaaaacgtttctttattgtgctttagttggacctcttgataaattctcgttcgtttcattcgtacagaagccggattgatgccgagcaatttggcttcatcatttgcgtcaaatccaaagatatggagatagcaatattgatattctgattctgtcaggttgggaaatgcctcttttagtagggagtagaattggggatatatcttgtctacttccgtcattatggaatgccatgttttgtcagtagggagttgggagtcctcaagcctattttttttagtcaaagaaataagcttcttgccaactgtggatgtttccagactttgcttttgcagccggtcgtatttataggatattacttctatttcctgttgtagtttgtgggcattattctctttgtctgccaatgctttttgcaaaatctgctttttttcttctagttctgcagataagtgaaggagctctattttcatcttatctagaattgtttgctggtaatagattttggctttgcttctctgccggtaaatgatatatcctgcaactgatagtaagaataaggagatggcaataatgatgatgattgtattcctttgctgtgtaatctttaatagttcgttctcttcccgtatcttggcgttgttatactttttttctatttccaatacttttgtctcattttgaactaatgtcagtgaatcgagcatgtcggaacagatttctttgtaatggagtgcttccttgtattttccttctgccttataaagcaggtagtaagcttgattgaagtaataagcgatatcattgtgtttggttatcgtttcaatccattcgtgtgcttttgccagttggttgtcttttatatatatgtgtaatagggagatagaatccttatagctttctttgctgcccgtttcaatggcttttaagaaatatctttcggcattcttgtatttttcttgtgcctcatatatcactccaaaagcattggctacatcagctgttaaatctttgttatgcagtagttgtgagatggaatcagccttttgaagtaagggtatggtgtaattaaaagaatcagtgagtgtacattcacacgctaaatcttttaaggcgtatgcatagcttttgtagttccttgctttcttgaagaagttactggcctcttttcttttctccagacgttcactggttatatctctaaaaccatacaaatctgccatataggcacaaatataccctgccacattataggcctgatgttctttggccagttgcagtgcatcggcatatatttgcattgctttatcatactccccatcttctacataagcacggcccagatacaagtctatttgcgcctgttcttctgccgtgccgtgttcggtgaaccattgttgtgcccgttgccattggtagatagggagtaatccggtggctgcttcgtccgttactttaccgcatagcatacaccagtgggcaaagtccttatcagtcagttcatcgggggcttgtatgctgtccagtagcacggaagcactatcggcatacatgggaatcagttcctctacagattgtaatagcggaagtatgcttgtctcttttctgcatccggggaggatgagaatgaatagtagtcctgtcaaaagtaaagctttcataagaatgtgttcagattttgcaaatatagtcataaatccgggcaacttgtatctgatagagggaaaagtcagttttttatgctttccgtggcttctcctttggaagtgaggtgggaaagcatgaaagctctttgtcttgtcagtgaaatctgtctgttgtattttgttcttctgccttttcatcaagttttatcactaaagtgaagaaactgtatcactttagtgatgaagcttgattaccttagtgataaaagttcatcactaaggtgaaacgattaaatgaaaaggcagagattgggagaaaataccggtggaatcactcaagttacaggaacggaattcattttgtttgcgccatttataacggttgtaatgttgtgctttctattgaaatatcctatgacaaaatgatgaagaatttatgaataaatcaatcatggtaaataattggttatcaacacttaataagtaaatgaagaatttgaaggaaataatcagccaacaggatactgtaactccttgtgttttgaatccgttgtttttacgccacaaatcttctggtccatttgcatgcatacatccctctgaccaccaggtagctgatgagaaaggctgttacggccatgcaaataatgtgtattatggcaggaatcccctgaggcaacagcgaggcgaacaagtcatatcccatttgcacgaagacgaaatgacacagataaatgccgaaggtcatggatgccacttttgaaagaacaggcgaagaaggtattttaagcttctgtatacagacaaaaacaggaaatgtcatcataaatacattgatgccgccgaaaagccatactatttccagataggcgtagtttcccggaaaatattcctgcatgatgaggtagccgccaaaagtgatggcgtaccctgtcacaaacatagggataccgatagccagggtttttctccaactccattgcagcgggtattttaccagataatgggccagtatcagatagccgataaatccggaaacataataaaatgaaccgaatgcattccagtcgcacactcccaggatatccatattgccccagttgccgatatatcccagtgcgggagcggccatctttatgtagggaaggaacaaggagatgccccagatggaaagaaatagcttgatatctttccgggtagcacgctccagccatgcatggaagatggggatgatgaagtagagccccaccagcatatacagataccacagaggagtggtgtcatagttgaaattgaaaatgaatgtccaaatcttcgtgatagtcatttccagggtgaaggcggacatgtctatggtaggattgtctgtcgtggtgatgtaattcagataaatgaaatacaatacaggcagcatgaccgaccagaagataagcgggacaacaatgcggccgatccgctttttgtaaaattcactcatgccgtttcgtacaggaaacagcagcactcctgtcatcatcacaaacaagggcacgcaacagcgtacggcacttcccaatgcgcacccttgcagaaaagtaggacggtctgtgtcaaaacgtgccacaaaagggtcacagcaatgggcgaatacaactaaaaaacaggcggtgacgcgtagcaagtctatccatccgatgttctctcttttatttatttccatattctctgttgggcttatttttgttcaagcaccactactaagggacggtgatctgatgctaccggttcatttactacctgtgcggaggttactgtgaagcctttcatgttctgtttcagtgctgtaatataatcaatggtttctgtaggggcgggagccggaaatgtatgctggtttacgtcagaaagtatctgaaaatcctgttgcaagtattttatgaatgcggattcgggttcggcattcaggtcgccggccaggaaaaaaggttttttgtgagcggcggcaaagtcttttataagcttcagtgaggccatgcggtcttcttcggtgagagacagatgggtgcaacaataaatgtagttgtcgaactctgccataatcagcgcacgtgcttcttcccgtccgggaagtgtcatggttttcaggctgacgggaatttctttggtgagaagtccgataccatattttcctccgtcgtaatcaatggcaggggcaaagtaagcgtgcatttgcgtacgtccggctatctcgcccagtacgtatttttgtccgctgcggtgggtcatgctgtccagttcctgcaaggctaccacttcggggtggatatgattgattacatcggctatgcgttggaagtcgcatacatcatccattccgtttgcatttttaatgttataggtcattagccgtaacgaattttgtgattgtgccgacagggctaaaagaagggtaaaaagtaagagcaatgtctttttcatatattcatcaggttttgattgtttaaattctctccaaagatagataaattcattctttttttctttgccctcaaagataaaaaacaagagaaagtttttatcagaaaggaaatgtttctgttcaacaacttgccggggctttatttctttcctgccggagaagcctgtgtcatacggatactgcttaccacgcctgcggcaatggcaaagaatatggctaataacaaacaagcctgcgcccgatgtccttcggcgaacatacggaacaacaaagcaaccagtgtggttcccaaagtctgacctaacagacgcgccgtacctagcataccgctggctccaccgcttctgtgagtgggagcggaagaaacaatggttacattattgggcgtctggaacagcccgaagcccataccacagagtgccattcgccagatgatattccattctgccggatgggggggaagcaaatagagtgtgaataggccggtagcgaagatggccatgccgatgcctcccagcaatccgggatgtactttctctaccagtctgcctgcaagtggtgcggtcaggatggtagccaatggccagggggtaagtagcaaaccgatctgtacggcgctgtatcccaatatattctgcataaaaaacggtaaggaaaccatagccagcatctgggcggtgaatgaggtgatggaagtaccgatagaaagagcgaaaataggaatcttcagtaagtccacaggtaggataggggtcgtttccttcagttggcggcggatgaaataagtgccgattatgattaacaaaaccaactggatggcaatgaactttctgttttcggcgtgtgcaaaaccttccaaggtataaattaacaacccgaaggtcagtgcgttggctatcgcactgattttatcaaacttgtgttttgtgtctgaagccggattatgcggtaagaaccgatgtccgatcactaatgcagccaatcccaaaggaatgttgattacaaaaagccagtgccagcttcccaatgctaagatactgcctgcaatggatggacctgcggcggccgaaacagctaccaccatggcatttacgcccattccgcgccctagtatctgcggcgggtaaattaaacggataagggcggtattgacactcattacacaggccgccccgaaaccttgaatgatacgggagacagtcagcatccagaaagagtccgagagggcgcaggccaaagaggcgcctgcaaaaatggagatgccggtcagaaatatccgtctgtaaccgtaaatatcacctaatgaggcaaatgatagcaaggtcatggtaatcaccagttgataggcattgacaatccagatggcattggaaggggtgacatcgaaatcgtgtgccagcgtgggtaatgcgatattcataatggttccgtccagtacggacatcatgatagccagcagtacggctaccactgcgaaatattgtttaggtataaatgcggtcttttctttgctcatgatgcaaaattaacggaaatcggtcagattaggtttaatttcttctaaataattgctattccaatgttaaagaaccgggaatttatagaatggttaaggaataatgcttatctttgcagccgttaaaaacagtggagagatttgagtagcttgcaaccacagaaaaaaatgctaaaaaatacattgactttcttatttacatttatctactctgataacttcccaaggtggttaacgaattaacttttaatttttaattcttaattttcaatttagaatgggatatttattcacatccgaatcggtgtctgaaggacaccccgacaaagtggccgatcaaatatcggacgctgtgcttgataaactgttggcgtttgaccccagttcgaaagtagcttgcgaaaccctggtgactaccggacaggtagtgctggctggagaagtgaaaaccaaggcgtatgtagatttgcagcgcattgcacgtgaagtgattaaccgtatcggttataccaaaagcgaatatatgttcgaaggaaactcctgcggcgtattttctgccattcacgaacaaagtgcggatatcaaccgtggcgtggaacgcgaggaccctatgaaccagggtgcgggcgaccagggaatgatgtttggttatgctaccaatgaaacggaaaactatatgccgctgtcactggacctggcacataaactgttgatggtactggccgaaatccgtcgtgaagggaaggtgatgacttatcttcgtcccgacgccaagagccaggttactattgaatacgatgataacggcaagccggtacgcattgatacgattgtggtttctacccagcatgacgagtttgtaaccccggctgattcttccaaagaagctcagttgaaggccgacgaagagatgttggccaagattcgtcaggatgtgattgaaatcctgatgccacgtgtcattgccggaattcataatgaagaagtattggctttgttcaatgaccggatagtttatcatgtgaaccctacaggtaagtttgtgatcggcggtcctcatggagataccggtttgaccggccgtaagattattgtggatacatacggtggaaaaggtgctcacggtggcggggcgttctcaggaaaagaccccagtaaggtagaccgtagtgctgcctatgcagcacgccatatcgcaaagaatatggttgctgccggtgttgccgatgaaatgctggtgcaggtgtcatacgccattggcgtggcccgtcctatcaatatctacgtaaatacgtacggtcgcagcaatgtgaaactgagcgacggagagattgctaagaaaatagacgaactgttcgatctgcgtccgaaagccattgaagagcgtttgaaactgcgtaatcctatttatgaggaaacagcttcttacggtcacatgggacgtgagccgaaagtggtgaccaagacatacgaatccatgtatcatgaagcaaagacgctggaagtggaactgttcacttgggagaagctggattatgtggataagataaaggaagcgttcggtttgtaagaaacggattcgaatatggtgatgtatacgggcgaattcaattcgttcctgcggcaatgagcgtcattggctggcaggggaggattggatccgcccgaaaacataaggaattatatgaatgatataaagaatgtatgtgtatatagtgcgtccagcacaaagatagcgaaggtgtattttgatgtagcggaagaattaggacgtcttctggctgaaaagaagatcaatctgattaacggggcaggctgtatcggcctgatggcggctacctccgatgcagcattggctgcaggcggtacggtgacgggggtaatccctcattttatggtggagcaggggtggcaccatacagggctgacccgattgattgagacggaaaccatgcacgagcgtaaacggatgatggccgatttgtccgatggtgtcattgcattgcccggaggttgcggcacattggaggaattgcttgaaatcatcacctggaagcagctggggctttatcttaatccgataatcatcttgaatatcaacgggttttataatcctttgcttgaaatgctgcaaagggcggtggagggtaattttatgcgtaaagagcatgttgcgatctggaaggtggcttcaacagccgaagaagcgataaatttgctctatacaacgcctgtttggaacaaggaaatacgtaaatttgcagcgatatgagtgaaacctgtcatcccggaatagcgtatattctccaactttatacggaagagcagagccgtgttgatacggctttgacacacagcgtgtgtcatatgtccaaggaagacgggatgagaggaatggagttgccctatcagctgcgttcggactggatggtgacctgcgtgctgtttctttgctttatcctggtatcatacgtgctggcacatggcaagaaacatcttgaacagcaatttaagaattttgctttgtctaaagagcgtgccagtttgtttgatgatactaccgcatctgatgtgcgttatacattggtgctgatattgcagacctgtatattatccggtttttgtgtgtacgattatttttcggaccatgacctgctcctttttcgtacggttcctcattgtttattgctaagtatttacattggttatgtagtttttttctttgtcatcaaatggcttctttatagctttgtaaattggattttctttaacaaaacacgcaatattatttggctggaatcttactttaatgttgtaatcggggccggatttttactttttccaattgtacttttgattgtgtatttcgatctgtcaccgcaaattgctccttattttatcggttttgttataataattgctaaaattctgctgttttataagtgctttagtaactttttcaacaaattttatggcgctttccatttaattctgtacttttgtgcccttgaaatactccctgattttgttctgtggaaagggattatcttagcgaacaacattttgattttaaatttttagtacattgaaaataaaaaaagtcctcgtatctcagccgaagccgacttctgaaaagtcgccatactatgatattgctgagaagtacggtgtgaaaattgatttccgcccgttcatcaaagttgagagcttgtcggcaaaagagttcagacagcaaaaagtctctattcttgatcataccgctgtgatttttacatcgcggcacgctatcgaccatttcttcaatctgtgtacagaattgcgtgttactgtgcccgaaacaatgaaatatttctgtacgtccgaaaccattgctttgtacattcagaaatatgttcagtatcgtaagcgtaaagtgttcttcggcgcgaccggtaaattcgcagatttggtgccttctatcgtaaagcacaacacggaaaaatatttggtgccgatgtctgatgtacacaatgatgagatcaagactttattggataaaaataaaattcagcatacggaggtagtgatgtatcgtacggtaagtaatgatttcactcctgaagaagagttcgattacgatatgctgttgtttttcagtcctgcaggaatcaattctttgatgaagaattttccggagttcgaccaaaaggaaattgcgataggatgttttggtcctgctactgctaaagcggtaaaggatgccggattgcggttggatctggaagctcctactgtagaggctccgtccatgactgcggcattggatatgtttatccgcgagcgtaataaggattaatttttagtttatatcccaaaaccgggggttttgtatcaataaagttgtaactttgtgattcgaaaccctcggtttctttattttaataaaagaaagaagattatggtagaatatacactcggtaaaaaagagcgtctgaatagtaagacattgattgagcgtcttttttcaggtggaagcaagtcttttccggcttttccgctacgtgtggtgtatatgtcggtagagcctgtggaggaagatatggcggcagcttccattctgatcagcgtgcccaagaagcggttcaaacgtgcggtaaagcgtaatttggtgaaacgtcaggtacgtgaggcttatcggaagaacaagcatttgttgctggatgcgctggcttcccggaacaaaagactgattatcgcctttatatggctggataaccatattcattcttctgccgaagtggaggagaaagtgaagaagctgctgtttcatatagtggaaaggctggaatgaaaaagatactttcctatctgttgctgttgcctgtttatttctatcgggggtacatttctccaatgactcctccttcatgccgttttgtacctacctgttcggaatatgccatcgaggccattaaaaaacatggtcctttcaagggattgtatctggctgtccgccggatattgcgttgccatccgtggggcgggtcgggctatgatccggttccgtaaaatctgttgtccttatgttgctggatattcatacgcatcgcaatgctgctgtaccgggagaatgcattttcaatgtagagcctgcatggtttgaacctgtggaagggtgttattattctgtaggcattcatccgtggaaagttttggaagctggtccggaagattggacaacgttggaaaaggcggtctgtcatccctctgttctggcgataggagaggcgggtttggaccgtttgggtccggcagatattctgttgcaaaaagaggtgtttgtccgacaaattttattgagcgagtcagtaggaaaaccgttggttattcattgtgtgaaggcgtttaatgaactgattgaactgaaaaagaagtatcgtccgcagatgccttgggtggtacatggtttccgtaataatctgcatattgcctgccggctgatgcaggaaaacatttatttttcgttgggagaaagatatcagcctgatgtgttgcggcacgtgcctttagaatgtttattggccgaaacggatgagagcacgcaggatatccgtatggtgataggacggatggcggaaacgaagaatgtggaagtttcctttctgtgcgataggatagatgaaaatgcacggaaaatcttttttcggcaataagagttgtttcttcagataaagagtcgtacttttgtggcatttaaagtataaatcaaacatttaaatagataatcattcgatgaattttgtagaagaattaacatggcgtggaatggtgcacacaatgatgccgggcaccgaagagttattggctaaagaacaagtgacagcttatctgggtattgaccctacggctgattctctgcatatcggccacttgtgtggtgtgatgatgctacgtcatttccagcgttgcggtcataagccgttggcattggtgggcggcgcgaccggtatgatcggtgacccttccggcaaatcgcaggagcgcaatttgctgaccgaggaaacattgcgtcataatgtggcttgcatcaagaaacagctggctaagttccttgactttgagagcgatgctcctaacaaagccgaattggtgaataactatgactggatgaaggattttactttcctggactttgcccgtgaggtagggaagcacattacagtgaattatatgatggctaaggattctgtacagaaacgtttgaacggtgaggcgcgtgacggtttgtcatttacagaatttacttaccagttgttgcagggatacgatttcttgcatctttatgaaacaaagggctgcaaacttcagatgggtggttcggatcaatggggtaatatcactaccggggccgagctgattcgccgtaccaatggcggtgaagtgtttgcattgacttgcccgttgattacaaaggccgatggtggtaagttcggtaagactgagtctggtaatatttggttggacccccgttatacttctccttacaagttctatcagttctggttgaatgtaagtgacgaggatgccgcacgttatataaagattttcacttcgctgagtcaggaagaagtggaagcattgacagcagaacatgctgaagctccgcacttgcgtgtattgcagaagcgtctggctaaggaagtaactgtgatggttcattcggaagaagattacaatgctgctgttgaggcatcgggcatcctgtttggtaacgccacttccgaagcgttgaaaaagctggatgaagacacgttgctggcagtgttcgaaggtgttcctcagtttgaggtgtcacgagatgcattggccgaaggtgtgaaggcagtagacttgttcgttgataatgccgctgttttcgcttctaaaggtgagatgcgtaagcttgtacagggcggtggcgtttcattgaacaaggagaaattaagtgcctttgaccaggtgattacgactgctgacctgctggatgaaaaatacctgctggttcagcgcggaaagaagaactattatctggtgattgccaaataagaaaaaagagaacttcttttataaataaaaaggggatattcagtaaatgtccctacaaacaaaaaccggaagaagaaaacctgttgtttctccttccggttttgtttgtatcttttctttcgtcttattttccgtctatctctttcaacagctcgtctaccgcagctttcaattgtgtgtcttcacctttcactactgtttccggtgaattggccactttgatatccggctctaattgtgaattttccagataacttccatccggcaagcgatagccgataacaggaatgccgaataccagtgtcggatcctgcaatgtttcccaagatacgctggtcatggttcccggtacaggcatacctaccagcttgcctattttttgatggctgtatacccacggagtgccgtgtgcgttactgtagttggcttcacactgcaccatgatactcggcttgttccaacggcggctgggcatatcgcaagcttcacgtccgcgaactacctgtgtaaagtatttctttccgctgaacaggatctcaatatcctcgtgcaaacgtcctccgccattgaaacgggtatcgatgacgataccttcacggttattgtacttgcccagaatatccgaataaacggaacggaagctgtcatctcccatggattcaatgtgcacatatcccaaacggccgttcgaccatttgtctacatcggctgcccgttgttttacccagcgtgcatagagcagatcgctcattacaccattgctgacaggaacaactacttcttcccaacgttctttggtctgcgggttatagagcgtaaccagtgttttctttctggctttaccgttcagcagaacagagtaatcgctttcgggagtgatttcctgaccgtcgatcttttcaatgatatttccggccttcactttggaacgggcgtggtcgaaggggcctttttccactacttcagaaatcaacagacctttgccgttatgattccagtcatacagtaatcctaaggtagcggtggcatctccttttagttgcggacggaaacgtcctccggtatgtgaaacgttcagttcacccagatattcgctcaataattccgcaaagtcataattattatcgatatgcggcaggaacttgcgataggctttggtcatggcatcccagtctattccgtgcatgttcaggttgtagaagcgtttctgttcttgtttgtatacatggttgaacatatagtcacgttcggctgcgagatccattttcacgtgggcttgatagctgatgggcttcaaactttcagaatcagtacccattttctgcatcgtgttactgcctagcaagaacaagttctttccatccttgtccatttccatgttggcccatccggcatccattttatggagcaacttggtatctttcttgcgcagattcattttccacaggtcatagccgccttcaaaggcagagaggtaatataaggtctcgccgtctttggtgataatggcactccccaaatcggaagagttgggagtaaggcgtacgatgcggtcctctatgttgttcagttccaccacaatgtcctttactttttcctctttcttctcttcggatttttctttgttatcacctttctttttatcgtttttcttggtttcggttgtgtccttttgttctttttccagttctttctgcaattcgtaatcttctttgctcaggcggaatttgtcgtatgcatcctggttcataaataccagcatcacatcgttcagtgatccccatgaggcatgggcacgcataccataacgctcggtaatgaataaaatggcattaccatccagtacccagcggggggagccactggtatagccgctattggtcagattgataatttttcctccttgtgcacttaccatacctatatcggaatatggatcatgccggtttccgataaattccaatgtgaaccatttgccgtccggcgaccatgaatagtcaaagccaccgccggtactgaaccaggtggaaccgtcagtgacctgacgtacctttttggtttccagattaagcaccatcaaccggttacggtcttctataaaggcaagttccttcccgtccggtgagaattgcggataggtacgttctgtcttgtccgaaggcaggagtacttcttcttcaatggcagtcgcattggggaagttggcttcctccttacgtgcaatcttggccatgtaaagttcccagtttccgttgcgttcactggcgtacgccaaagtacggttgtccggtgagaaagtaagtcctgcttcacgggcaggggtatgtgtgatttgcttggtggtattataatcggcggaagtgacgaatacttcacctcgtacaatgaaagcaacttgtttgccgtccggtgatacggtagctgaggttgctccgttactgaaattcagatccgctattgtattttggtcatcacggatgatatcgattttgactttctgcggtttatctccttgtttttgagtgtatatttctccatcatacgtataacagagagtgccgttgctgcccattgacaggaagcggaccggatgggtcttgaaatgggtgaccgttttcaatgattgaggactacttatcggaaaggaatatacgttgaatgtacttccgtctcgttcgctcaggaaataaacggtttgcccgtcgggcgcaaatacagggttacggtcttcgcctgcatgggcggtcaggttggtatgcttgccgttttccgaatcatataaccatacgtcacgggtgatggacgaggtgtggtgtttgcgccattcgtcttcaaaacctttgcggtcttggtagagaaatgtttttcctgatttgtcaaagcagaccatttctgcgggagtacccagcacctgttcggtacgtccgccggttaccgggactttgtatagttctgtcatggccgaagtagggaacaaggcactgttggcagggtcttggatagaggccgagaacaggatatagttgccgtcggtggtgaaggttgacggtatttcggaagccgaatgggtggtaagacgccgggctgctccgccatcggccgacatgacgaacaggtcgaaattgccattgcggtcactggcgaaggcaatctgtttactatccggtgaccagatggggctgcactcgtatgaggcttgtgtagtgagttgggtggcagttcctccgttggcgggtactttatagatgtctcctttataacagaatgcaatttccgtgccgtcgggggaaatttgcacgtcacgcagccataaaggtgtagctgcataactgcttgctgcaacaaagcttaaagcaaggcaagttagaagttttttcatgtatttatttcttttagtttgtacgcaaagttaagcatttgcactttattgcaaaaaaaagtgcgaaaatatttggaatatattgcaggaaaaacgtatctttgcaccgctttctaaggaaagcacataatgattggactatggtgtaatggtagcacaacaggttttggttctgtttgtccaagttcgaatcttggtagtccaacagttttcaatccgaaatgaaacaaaagcccgttaaacatacagtttgacgggcttttttcgtatcgatcatatcctttaatatagtcaatacaaggagcagcagtaaaaaaacaatcgatgccgttaattagcggcttagcacatttacaatttccaccacatacatcttgtgaaaaccaccgtgtgattccccataccatcggtccgtaatgctcttgtcgataaagtttccgggcttgatcagatcggcatacagtttcttgcattcaaaagtcaaccgcgcctgctcaaaagtgatgcttccgttctcggtgaacaagggcgatagtcctgtcgcttttactttatccatgtcacgtcccgatttggaaccgcatatcttatgtatttctttatgctcttcacctagaaaagagagagtgagatagtcattctgctctataaagtcgaatgtataacgttcggggcggataaagataaaggctaccggacggttccatagaaatcctgcacctccccagtttgccgtcatggtgttgaatttgtctttggtaccggcggttaccaacatccattccttgctgattgtctcaaacagattgtcagtcagttcgtttacttttatttctttcattgtttccgtatttttagctagtacaaagatataatttttttcttttactgtttcagattaaatttgctaattattatctttgcgagaaatattaattaaaaaaagaaaggacgatacagtggcaaatgatgtagttttaaccccgatgatgaagcagttttttgagttgaaggcaaagcatcccgatgcgattatgctattcaggtgcggggatttttatgaaacttattcagaagacgctattgttgcctcagagattttgggtattacgctgaccaagcgggccaatggacaggcaaagagcgtagaaatggccggctttcctttccatgcattggacacgtatttgcccaagctggtacgtgccggcaagcgggtggccatttgtgaccaattggaagatcccaagatgaccaagaaactggtaaagcgcggtatcaccgaattggtgactccgggtgtagccatcaatgacaatgttctttcttacaaagaaaataattttctggctgccgttcattttgggaaagccagttgtggtgtggccttccttgatatctctaccggtgagttccttaccgcagaggggccttttgactatatagacaagttgttaaataatttcgcccctaaagaggtgcttttcgaacgtggtaaacgggggatgtttgaaggaaatttcggaagcaagttctttacttttgagttggatgactgggtgtttaatgaaagttcctcacgcgagaagctgttgaagcactttgagaccaagaacttaaaaggtttcggggtggagcaccttaagaatggtattgtagcttcgggagctattttgcaatacctcaatatgacgcagcattatcagatcggccatataacttctctttcccgtatagaggaagaccgttatgtgcggctggataaattcacggtacggagcttggaactcataggtagcatgaatgagggcggaaccagtctgctggatgtgatcgaccgcactatcagccctatgggagcccgtctgctaaaacgctgggtagtctttccgttgaaagatgagaagcctgtcaatgagcgtctggatgtagtggaatacttcttccgcgagccggacttcaaagagttcatagaagagaaactacatctgataggagatttggaacgtattgtttcgaaagctgccgtaggacgaatctctccacgcgaggtggtgcaacttaaagtagctttgcaagccatagagccgattaagaatgcctgtttgaatgcggataacgggagtctccgccgtattggggaacaactgaatttatgtctgtctatccgtgaaaaaatagcgaaagaggttaagaatgatcctcctttgctggtgaataaaggcggtgtgatagcagacggggtgaatgcggaactggacgaactgcggcagatagctttttccggcaaggattatctgctcaaagtacagcaacgtgaaagtgagctgaccggcattcccagcttgaaaattgcttataacaatgtgttcggttactatattgaggtgcgtaacacgcataaggataaggtacctgccgactggatccgtaaacagacgctggtgaatgcggaacgctatattactcaggaactgaaagaatacgaagaaaagatcttgggggccgaagataagattttagtgcttgaaacaaagctctataacgaattggtggtcgctttggcagagtttattccagccattcagattaatgccagtcagattgcccgattggattgtctgctggcttttgccaatgtggcgaaagagaacaattatatccgtcctgttgtggaggacagtgaggtgattgacatcaggcaaggccgtcatcctgtcatcgagaagcagcttccggtaggggagaagtatattgccaatgatgtctttctggactcggaaacccagcaaatcattatcattaccggtcccaatatggcgggtaagtcggctttgctacgccagactgcgctgattaccttgttggcgcagatgggtagttttgttcctgccgaaagtgcgcggatcggtatggtggataaaatattcacccgtgtgggagccagcgataacatctctgtgggcgaatctacctttatggttgaaatgaatgaggcggcaaatattttgaacaacctctctagccgcagtttggtgctgtttgatgagttgggacggggaacctccacttatgatggtatttccattgcttgggctattgtggagcatattcacgagcatcctaaagccaaggcacgtacgttgtttgccactcattatcatgagttgaacgagatggagaaatctttcaagcgcatcaagaattacaatgtatctgtgaaggagatagataataaagtgatttttctgcgcaaactggaacgtggcggcagcgaacattctttcggtattcatgtggcaaagatggcaggtatgccgaaaagcatcgtgaagcgtgccaatgatattctgcatcaactggaaacggacaaccgccagcagggcattgccaagcctacggctgagatagcgtccggccggagcggaatgcagctcagcttcttccagttggatgatccggtattgagtcagatacgggatgagattctgaatttggatgtcaataatctgacccctcttgaagcattgaataaactgaatgatatcaagaagatagtaaaaggcaaataaatgccttcatttttcattaaccgttaattactaaccattaatcattatcatgaaacacttactaaccttatggatgttggccttgtgtctgtgtgtttcggccaaggaaacatgtccgaaagtaattcccgccctgcaagagtggagggggggaagtggaaaactcgtattgcctgctgaaggcagtattgttgtagctcctgccgatgaggcggcactgaaaagtgtggcgactgtgctggcacaggacttgaaagatctgttggattggaactacaccattaggaccgggaaaccgggaaagaatgatatttatctttcattgatgaaacccgacaaacaattgggaaaggaagggtatgtgctgactgccggacgctatgccggtattgaagcaccggctcgtcagggagtcttttggggaacccggagtttgttgcagattctttataatgaaaaaggacagttgcccaaaggagttgcccgtgactggtcgcaatatcccagtcgtggcttcatgctggatgtgggccgtaagttcttcacaatggatttcctgcggcaatatgtcaaaatactatcgttctataaactgaatgaattccagattcatctcaatgacaatggttttgtacagttctttgataacgactggaacaagacctatgctgctttccgcctggagagtgagcgttttccggggctgaccgccaaggatggttcttataccaagaaagaattcaccgatctgcaacgtctgggcatggaatatggtgtgaatgtgattccggagattgatattccggctcattcattggcctttacacattataaacccgagataggcagtgataaatatggaatggatcatttggatttgtacaaggaggaaacctatcgttttgtagattctttgctggatgagtatctttctggtgagaaaccggttttcataggtcccgacgtacatatcggtacagacgagtacaatgccaaggaagctgagaaattccgctattttacagaccggtatctgaagtatgtagagaaatacgggaagaatgtccgtatgtggggagcactgcgctggttgaaaggaaacactccggtgaaagcggataatgtaactattaatgcctggtcatacgattggattgatcctaatgcttctttgaaagacggatataagattatcaatacgtgtgatgcttatctttatattgttccggctgccggatattatcgtgatttcctggacacgaaatggctgtatgagcaatggcgtgtgggtaaagtgaatcctaaggaagagttgcctgaaggaactccgggactgttgggaggtatgtttgccgtatggaatgaccattgtggtaacggtgtgtcacaacaggatgtgcatttccgtacattcccggccgctcaggtactggccgagaagatgtggagagggaagaatgaaatggtttcttacgaggaatttgaggaattgtgcaaacagatgcctgaagctcccggtgtcaacctgctggggcgtgtgcagggtgaggtagtccttccggggcagaatgaagaactgtctttgaacggtacggacagcattgccactatgttgccggaggtaggctatccatacgtggtagaatttgaaataaatccggacaaagaccaaaatatcaacggtattttgtttaaaggtcctcattccaccgtatatgccaattgggaaaataagggaaaattggctttcagccgtgacggctatacgtttgtattccacgctgccacactgcctgccggagcatggacgaaggtacgcatagagggagaccacaaaggtactactctttacataaacggtgagaaagcggaacgtttggaaggacgtgtcaagcagttttacaactatactcataaacgcaaggacaagatgtatatgcaggaaactttggtgtttcccatgcggcagattggggatgtgcagaatgggttcagagggaagttgcggaatataaattgcacgcaataaaagatatttctttctcttgctgtgtaggggcaggttttagacctgtccctatgctcaataggagtgaaatttctccgaatgttatctttaatagtgttatattgtttattatcaaagttttatatgcggtaaatgttatctgttttattttcatgaaaagggctttataccttactttgcattattaaacttaagcaacaaacccgatgaaaataaaacaaattctactttgcatgcttttagcctgctttattcttcccgcttccgcacagaatagctggggtattgtaggaggcggacttttttctaaatctctgtccagggatgcacgcttcagcctgggcggttatgccggaggaatgtatgacgttcatgttaaaaactcatggtatgtacaaccacaattattatttacttatgaagaattcagatccaagacaagacttggtaccgattctttttttagtaaattcaatttggagcttcctatccttgcttcttataatgttgctttgaataacaaatggaatttgcgcatcaatgcgggaccgtatctgtcctatgctatgtttggcagggataaatccattgattacgcctatggcaacggaatgcattctagtttgggctggtggcatcaggattttccagatcattttacttacggcggaagggccggggtttcattggaatccgagcatttcatttacactatcgatggtaagtgttctcttcgtaagagacctttcgggcggagtgtcagtttatcggccggtgtaggatataagttctgagttttctgtatctttgtcaccggagaataaaaatagagttgcatgtatgtttatataaaacagttgggtattgtttgccttctatgttggcttggtctttcctgtactttgcagcgcacggaacatcctgctttgcggcaagccggatacttgatggaagaacattccgacagtgcgttttcattattgaaatccatctcttccctaaccggtatgagcccggaagacaaggccggttacgctttgctgctggctgaggctgcggataaaaatggttattcactgcttccttgtgactcattattgaattttgctctccatgtatatcatgaagaagccaaagaacatgccatagctcttctgtataagggtaaagtgcaacaggaaatggaaaactatgccgatgccctgaaaagttaccgtatggcgcttgaaattctttccgcctatccatgcgaattctattggaaagggtttgtatataatatgttgggtgggctgtatggcaaacagaacttgtacgcacaggccaaagatatgtatgtcaaggcttgttataatgattcgctggcacggcataaccgtcatttcatcagttcactcagcaacctgggggtagcttacatcgggtatggaaatatagactccgcttttatctgtcagcaacgcgctttgcagctttctctttctactgatagtttccttttgcattctctttatggaaatataggggatttatgcggacgtacaggacggaacagtatagctattatttgtctgaaaagggcatacgatgcctgtcgtcttagagaagacagcttgcagtgtctttggaatctaggggaattttattataataacgggcagcttgattcggctctttattatttgaaccgaagcaaggaagctgtcgatattcatatccggtatctctctttctttgacttgtatgccatagccaagcagcagggaaatgtggagaaagctttggaatatctggaaatcagcacccagttggaagattctatctattccaccaatgtggctacggaactggagaagaagacctatcgttggaatgccgacgcgcaagtaaggaaagaacagttcaaggctaaacggaggatatacaccattgcgatgatagctgtggtgttgctgctggtcattgtgattatttatcaacagatactgaagaacaagaagatacagcaatccaattataaatatctgttgcagaagctgaaacagaacctgatggatatgcagcagaatattgctcaacatgaagaggtgatagccgaattgaaacagaaacaagaaagccgtgtcgaggaaatagaagagaaggaacgggctatagaggccatgaagatggagaaggagaaattgcgcaactggttgttccggcaaagtgccctctatacgaaaatagacaaactggccaaccagcaaaagcatcacaaagagcgtattgcagtgctcaccaatgctgagcaacgccaactcagagtgattataggacagatttatgctgattacatagagcaactgcatacccggtatcccaagttgaacgaagatgatgtccttttgctatgtctgcaattggcggatttatctccttttgccatcgctttatgctttggtaataatgatgcacagattgtagcgcaacgcaaatatcgtatgaaaagtaagatggaataactgtgtgttacagaatttgcataatgtttttttaatagatgtttgtatatcaggttataaaggcattttgctatctttgtgcgtagaaagctaaaagacaaaatcactatgcgttcatttattatatatttaaatttcgtcagtttgctggctgtctgtttgtttgcctgtaaccaccattcttccaatccgatgttacagcaagtagattctttgttggaaatgaagccggacagtgcattgactattttaaaaaatatatctgttttagaggatttgccggaagtagacaaggcatactatgctttgttgctggctgaggctacggacaagaacaaactacccttattgccttgcgattccttattgaatttcgccttggattattatggagatgatgatagggagaaggctgtggcattgatgtataagggaaggctgctggcagagatggatgatgaaaaggcagcgatagagatgaatttgaaggcattggaaatattgcaggattatccggtagatacaaaatatagaagattaatttatagtgcgctgggattgtggtatgggaattgtgaattgaatgacaaggcattggaggtgttgcaccaatctcttcattattcttttgatgctaaagatactgccattgcttatattaatataggatatatttatggcatgagaaatatgcaggattctgccataacctatcagcgcaaagctgtgaagtatgccatgcgttctaaagatagaagcatgatacttacttcttggcataatttgagcatttgttatagacactttgaaaatgtcgattcggctgttgtttatgcgcataaggttttacagcatttatcttatgggaatggaaaagcagatgcttattataatatgggggatttatatgttgatttggaacaatatgattcagcacgccattatttagaaaagagtttgtttctttctccatctcgctctataccctactggtcacttgccgtaatggaggctgaactaggaaattttaagtctgcctatcactatctggatacgtttgttatggttcaggactcattagataacagtgagctattgacggaagtgcaacatttagtctataaacatcagacggaattaagagtaaaggatgaacagataaaatccaaaaggattataagatggattgtctttgtatccgttattatttgctttgtcgttgctttgatttaccaacgttggataaataagaaaaataaccagcaggcactctatcggcagtcattgcaatatgcccatgagaagcaggatatgatgcaacaacgtatagaggaaaatgaattaactcttgcactgttgcaagacagagagaaccaaaatcttgatgaaatcgataaaaaagaacgattgattgctcagttgaagcaagaaaagctggaacttcgcacatggacgttttggcagactcctatatataaaaaagtgatgtccttatccgaacaaaaggaagtggataaaaaggcacgaaaagtaatgacagatgtagaacgtgaaaaactaaagaaaacagtatttgagatctatgctgattatatttctcctttgcaagcacaatactcccaactgacggaggatgacttgttggtcctttgcctgcaagaagcgggtatttctccgttggccatttctttatgtttcggacatacggatacggtagccctcaatcaaaggaaatcgcgtctaaaaaagaaaatgtcagagtgataaactgaaatatattgtttatcagtgttttatagaaatattatgtcacagcaaatagttgtacgttctttcctttccctctaactttgcggcatcatttttaaacaaaaagaagtatgaaagcaaagttattattgatgttatttttagtttccttgagtttgggagtttttgcttcggagcatcaccaaaagaagcctcatgcagtttgcaaagtttatgaaaaggtggctactagaattccttttattttttcagtacaaaccgaggatataaatgactgcttgtatctcacatttcaattttcattagatgatgctgacattactatgctagataaggatggtaatgaaaaggtgtagttatggataacgcatttgaaaaaacagctgtacttcctaagtgtgataaaggaagtgcttactcgactcagataaatttaagtttttaagtaattccaattaaggctgtatgataatattttagttgataatctaaggttattgataatgtgaagttcatatctgaatcttattttattgctcatgttatgataaaatatgttatatggttgatttttagtgttgtataggtgagtggatgttatatggatagagctttatgcttatatcttctttctaattttgcaacatcaaataaaaaaataagtatgaagactaaaatgattgtagtggtggttttggctgcgatgtgtgtattgcctttgtctgcacaggtaaaagttggtgtggaaggtggaatgaacctgtctcattatctggtttccggttctgacggatataaagccgagcaggtaggtggaatgaagcccggctttcaattgggggtgactgtggactacgagataggaaagcattggatgttaatgtccggtttgtcttggttgcagaatagaagtaccatgaaaatgatggatcacatggttacttattttcctaagacagagataaagatgaataatctgattttgccgttaaaaatgggatataatattcgggtttcggataaactcagcctcattccgtcggttggagtttatgcttcttacggatttggtgctggaaactgttctttggatgttattcaccaagagggggataatataactaccgagcctgcaaaatggaagcccttggatggtttttcctataaagccggggagcccaataatagtggtaatcttcaggctttccgccgttgggattatgggggcattgttggaatgaaggctgttattgccgatcattatacgataagttttgattatagggtcggaataaaaaagatacaggcacaaaatggtttgcggaattcaactttccagttctccgtaggctatcgtttctaaactgatttaattaaactggcaatctgtcaaaatgataatgccggtgtatgagggtgtcctgttttaaaggatacagtttgtgtattttcatcgtattctcgtgcatcggcattttgacagattgtcttctttttctggttatttattcttttatggatatatgtgaacgtatatgtagggaaatgcatacatacgtgtccgacagggatctttatgccttttgagatccctctatttattgagccagctctttcaatatctcctctattttctgaaagagttgtcctatgtgcgctccgtccacaaaagcatggtttacagtgaaagcgatgggcattaccagtcttccttcgcgtggcactactttgccggcattcatcagcggatagtctaatggatggtcgggagccatttgtgtataggtgagtgaagtgaaataaagctgaggcgtggcactcagttggataatatcaaaatctccctgttctttaatgactttttcggctccatacgggtcaccctcttcggggatgttatggacgatgtgatatgcttcggcataaaaccgttcaaaatctgcatggtaagggatgcggactgtgtagaaagtcttgccgggtacagcgataggtgatatgatgtccacctgatcgtgatagaccacctgtccgtttttatctgtacggaaacggaattctttcacttcattggcagcacgtagcacagcatacaggtaatacaggaaaaaagagcgcttggcggcttttgcagctggaaatgcttcagtgcaatccacttcactggtaatggatatccatgaattatggaagttgcggaaaaaattataattgtcccggcgttcccaggtttcaatatctattatatgtttcatttattttacgggtttaaaagaatggtacatgaagtgcgctcccagcagtatgaacggaatgctgagccattgccccatgttcagaatcatactgtcttcaaaggcttcctggctggcttttataaactccacaaggaagcggaaggtgaatatggtagtgaggcagtagccgaaatagaaaccggggtatagcgtggttttgtactttttatacaaccgcaagcctatgataaaaatcagaagataggcgatggcttcgtagagttgtgccgggtggcggggttgcatatcttcgtgcggaaaaatgaacgcccaaggaacatgagttaccgtacctactatttcaccattcatcaggttacctaaacggataaaacaacctgccagcggggtggcgatggctatattgtctagtacagtcaggaacttcaattttacacggcgtgaatagatccataaggcgagcattagtccgatggttcctccatggctggcaagaccttgataaccggtccattttatcccagaatcggtaatcttgacgggcaacagcatttctacagggtgagagagccaatagcctggctcatagaacagacaatgtcccaggcgagcaccgataacaatacccagcaggcagtaaacgaacagggaatcaaatttttcgtaaggaattttttggtcttggtagagtttgtatatcacccagtaggccaatgaaagccctgtaacgaacaatacggagtaataacggatggaaatgccgaaaatggaaaagatttctatatcgggattccaaagaatggctgacagtgtattcatatcttgaatttttgtgcaactttgcggtaagtgggcatatccacatccatcttttcgcccagtgcgatcatatcaaacaatagtccttgtatttcggactcgtgtcctttggctatatctttttgcatggatgcggtactgtccgggtctaatttgtcaatcacttttaagttgtatcctatcgggtcttccgcataggtaattcccattttgcggcctatttcagaactttccttggacagaccgatgaaagagtcgcgttctgctccgggatgttgcagaggacccatcgggacatcatggtaggcacctgtgcaggccatagccgagatgaatgaccatttgatgaaggtgtcgcgattgatatcatccgaaatatcggctttgatccctgcttttcttagtacatcggcaatggtttccagacgttccggagccacaccctgttggggacgtgcaccgaaaaccagccggaatattttgcccatttgtgtgatttcacccggtccggaaacgaaacctacgatgtagatgcatccgtccaatactgttacatgtggaacgagttgcccgatgcggggacctgtaccgtaaacattcaggatggggataatcaaggtatctttatccgaggctttttccaacagatctttgatggaatccagggaatagcccttcacgcatacaaaaattacgttggccttctcgttgtattcctcggctgtgcaggcttgtataggtagaaagtgattaccttttaagtctgatcttaggtgaagccctttttcacgaatggcttccagatgcttgccacgggcaatgcatgttacgtcttttcctgctaaagcaaggaaaccggcgatgcttcctccaacgccgccggttcccacgattaaatatttttccatgttagttgtattttgttttaggaaacaaaacactgacttatcggtctgccatcagttttgctggtttcctgatgttttttcatgcattgcatgacaagtcttttgcgttttgatttaccttatacattgaaacggaagtgcatgatgtcaccgtcctgtactacgtattctttaccttccacgcccatttttccagcctctttcacggcggcttccgaaccatatttaatgtagtcttcgtacttgattacctcggcacggataaatcctttctcgaaatcggtgtggatgactcctgcacattggggggctttccatcctttacgataggtccaggcttttacttccatttctccggcggtgatgaaggtttccagttccagcaggtgataagccgatttgatcagacggtttacacctgattctttcagaccgacttcctgaaggaacatctggcggtcttcataggtttcaagttctgcgatatcggcttcggttttggcggctacgaccagaatttctgcattttcttcttttacggcttcgcgtacttgttctacatatttattgccggtagcagcacttgcttcgtccacgttgcatacgtacatcactggtttgctggtcagcaagaacagttcttttgcgattttttgttcgtctttgctgtcaaattgtacggtacgcgcagatttgccttgttccaatgcgtctttatatttaacaaggatgtcgtacatttgttttgcttgtttgtcaccgcccgtctgtgcctgtttttgtactttttgaatacggctttcaatggtttccaaatctttcagctggagttcggtgtcaatgatttctttgtcacgtaccggatctacactaccgtctacatgagttacattttcatcgtcaaaacaacggagtacgtgcaggatagcatctgtttcacggatatttgccagaaacttgtttcccagcccttcacctttgctagccccttttacaagtcctgcaatgtcaacaatttctacagtagtgggaacgatacgtcccggatgaaccagttcggcaagtttggtcaggcgttcatcaggaacggtgatgacacctacattcggttcgatggtacagaaagggaagttggctgcttgagcctttgcattcgataaacaattaaaaagtgtcgactttcctacgtttggaagaccgacaataccacattgtaaagccattatctatttgtttttttgattattatctatctatttgtttgcaaagataaccattctttttgtatcagacttcatattgaagtcagatttggcttttttatatgcgaaaagggggggcttgttacgaaacagaaagggcaaccgtcacggctgccctttcgtcgagtttttatgaaaagtgttagattgttagaatagatttatttgtccatagttacggtcatttcgggtactaatatatattctttctttttagagttccatttgtaatattcagtagtcatacttttattgccataagtataacgaatgcagaggttattttcccagcggtttttgttactgttccatttttgcgcctcgtcctcagtacgttggttgttggcgtcatacttgtaattgtgcttcatataattagtaagcatggtgccttccattttaaaaatcgtttccgaaacaactactccatttacttcttctgcattgtaaatcaggttgtcacccggatttcctgcaaaaactgtaaggttagcaataaataaaattgctacaacgagcattcctttcaaaaaattgatctttttcatgatattgatatattagattgttactttcatattgtttttaaaagcggtgcaaatgtacgaaagaaaattgaatatcctaacatttctgctagaaaatgatgatatttttgcaaaatgtcactgattaaacaaatattaagaattgtataatggctatttgttataattgtcttgtctttgtgttttccacttatgtctgggatggcaaatgaaaagctcaatggattggaaaataccattgagcttttatgatataaatactttacatatagtactatctattttgctaatagttggtttatgtatgctttaatgtgcttcaagccagttgcttccccaaccgcagtctgcgcgtaaaggtacttgcatacggtaggcattttccatctcttcaatcacaatcttctgtactttttccttttcttcgggtagaacgctgaaatttaactcatcatgtacctgaagtatcattttggactttatactttcagattgaaagcgctggtatatgcgtaccatagctaccttgataatatcggctgcacttccttggataggagcattgatggcattccgttcggcatatccgcgcacaaccgaatttctggaattgatatccggaagatatcgtttacggccgaatatggtttcaatatatccttgtccgcgggcaaggtcaatgcttttgtccatatattcctttatttggggataagtttcgaagtagccgtctattagttcttttgcctctttgcggtctacattcatacgttctgccagtccgaatacgctgatgccgtagatgataccgaaattagctgtttttgctttactgcgttgttcgcgggtaactttgtctatacttatcttatatacttttgctgcggtggcggcatgaatgtcatctccttccttgaaagcctctatcatattggtatctccgctaaggtgtgccataatgcgtagctcaatctgtgaatagtcggcggagaaaaattcgcagccatcatcggggatgaaagccttacggatttccttgccgtcttcgttgcggatagggatgttctgaaggttcgggttgctggaactgagccggccggtagcagtgaccgtttgattgaacgaagtatgaattttacctgtttctttattaatcaataggggcagagcatcaatataagtaccgagaagcttcttcagaccgcggtgttccaatatcttgcctactatttcgtgttttcctcgcagactttccaatacttcttcactggtgacatattgtccggttttggttttcttggccttctccacgatgcgcagtttgtcaaaaagcacttcacctacctgtttgggtgaagctatgttgaaatccgtacctgccagttggtgcacttcttcttctatttggttcatgcgggcggtgaaatgttccgaggtctgttttaaggcttcagtgtctacacgtacaccgttgcgttccatataagtaagtacgggtaccaggggcatttctatttcgtagaagagtttttccgcatcgttggttttcaattcctgttccaagatgtttttcaatttcagtgtgacatcagcatcctcgcatgcgtacttatagatagcttcgggggagaggtcgcgcatattcttttgacctttgcctttaggaccaatcagttcttcgatgtggatagtctgataatgcaggtagatttcggcaaggtagtccatgttgtgacgcaattccggttgtagtacataatgtgccaccatggtatcgaacaggggaccgcgcacttcggttccgtagttgcccagtaccagcatatcgtattttatattttgccctactttcaatactccttctttttcgaaagccagccggaactcattaactattttttgcgcttcagcccgatcggcaggtacaggaacataaaatgcttgattttcggcatagctgaagctcattcccacgagttctgcggtgatgggatcggttcctgttgtttctgtgtctagactgaaaatttcttttgtaagtaagttttgtaataattcagttcttttctcttctgtatcaacgagttgatagtcgtattttaaattatctaaacatgctagattcgaatatttctcactttccgtccctccgtcggtaaattctgcaaagagattgccttgaggagaagacggggaagcgggtgattcaccgttcgaagctggttcgccgaaaagggagagttgtcccgaaccgttcggcgtatttccctgccgggcgcttcctcccagtgtacggtttcgtccttgcgggtcgtttccggtcgcatcggggtatgttccggcgaaggcggatttcttgtttcggttgaaaacgcggtcgatgagggtacggaactccatctcttcaaaaatcttccgtagttcctcttcattcggttcttctcttttcagttcgtccatgttcaaagcgatggggacatcaatcttgatagttgccagaaacttggagaactcaatcattttccggttagtttccactttggtcttcaaggctcctttcagttcggcagagtgggagaggaggttctcgatgctgccatattgcgcgattaacttttgtgctgttttctcgcccacgcccggacaaccgggaatgttgtcggaactatcgcccatcagtcccagcatatcaatgacttgtgcgggtgactggatatcgaactttgcctttacctcttctattcccatcacttcaaaaccgcctgtatgcttgggacggtacatgaaaacatttccgcccaccagttggccatagtctttgtccggtgtcatcatataagtagtgatcccccgtttgccggcttcggtggccagtgtaccgatcacgtcgtcggcctcgtatcccggtacttccagaataggaatacggtaggcccgtataatatcctttataatgggtacggacaaacggattacttcgggtgtttcttcacgttgtgccttatactgttcataggcttcgtgccggaaggtgggaccggcgggatcaaatgccacaccgatgtgcgtaggattttctttcttcaagacctcttccagtgtattgacaaatcccagtacggctgaagtgttgaaacccttggagttaatacgcgggcttttgatgaaagcgtaatacgcacggtatattaatgcataagcatctaatagaaaaagtttgtccattcttaaaaatctttagttttttcattgtaaaagtacaaaaaaataccgtattccgtcttttattactacttttgtgcacaaattaacctgcatggacaaattacagcaaatcaaattgcctattgacaaggagtttgaggaatttagaaggttgtttgactcttcgctccaaagttccaattctttacttagtgaggtgttatcctatattaagcagagaaatggcaagatgatgcgtcccatattggcgttgttgattgctaaattattcggtgaaatcaatgattctacgcttcatgcggctctttcattggagttgctccatacggccagcctggtgcacgatgatgtggtggatgagagtgacaagcgccgtgggcagtcttcggtaaatgctatctataataataaggtgtcggttctggtaggcgactatatgctggcaaccagcctgaagcattctgccatgacccgcgagattacaattgtagatttggtggcttgtttgggacagaacttatctgaaggcgagattattcaattggcgaatattaatgcttctgagttctcggaagaagtgtattatgatgtcattcgtaaaaagacggctgcattgtttactgccagtgcggaagcgggggctatttcggtgcatgcatccgatgaaatggtgaaaaatgctcgtctgtttggcgaaatgattggtattgctttccagataaaggatgatattttcgactattattcttctgatgagataggtaaacctaccgggaacgatatgcgtgaagggaagctgacattgccggctttgtatgtgttgaatatgtttgatgatgaggagatgcggaaactggcgctacgcatccgggcattagacgcttcggatgaagatattgcccgtttcatcgaatatactaaggtgaagggagggatagagtatgccaggcaggcaatggtggattatcgtaataaagcgttggctttacttccacaatcagccggtcaagctgtaaaagatgctttgactgcttatattgattatgtgattgaaagagataaatagtacgattgttgaagatatgtacttcaaaaagttcgggcgtagtcctttatacaataaggatcacgcccgaactttttgaggtacgcctttctttggtagaaggtttacctttaaaataaccggaatagataaggctcattccggtcactttaaatgtggttgttatttaaatagtgaaacagttctttgtttagaagaacttggtttcttgacctacaatttctgagagaagcagattggccaggcggcttgttcctaagcggaataactcgtttgtcagccattcttcccctaacacttcttttacaatggtatagtaaaccaaagcgtcgtgtacggtattaattcctccggcgggtttgaatcctactttgcggcctgttgtcatatagtattctttgatagcctcgcacatcaccaaggcagcttcaggagtagcggcggggttttcctttccggtagaggttttgatgaaatcggctccggaatacatcgatagaatagacgcttttttgatgttggatgcgcttcccagtgctccggtttccaagatcactttcaggtgatgctcaccacatacagcttttaattcttctatttcatcacacattccttcgtaatccccactcaggaacttgcctaccgggataacgatatctatctcatcggctccggtatggagagccatggctgtttcggctacctttacttcggtaaaggtttgcgaggaggggaaaccgcccgatacacaggctatgtttacatgatctgcttccaaggtgtcgttgactacttctgccatattaggatatacacagattgcggctacattgtccagatcggggtacttgtcaacaaattcatttacttttccggtgaatttcattacactttcatctgaatcagtacactttaaagtggttaggtcaatgcaatggaacaggaatttctttacgtccggtgtattgttttctgctacatgtttttcgatgagtagggcagttttcgcttttacatcctcatcgtgcaaacggatgttatacttggcaagtgcttcttcgtacttgctgtgctcaggtccatgatcgtggtcatgacgatgttcatgtccaccttcgaattcgtgattatgttccataattctttataatttgggattgtttttatgtctgtctttatctctatttgttttcttctccaagttttgacggaaggcttcggtcaggtttactccggtctggttggccagacagataaggacccacagtacatctgccatttcatcggcaaggttgtctttctctccttgcttgaaagactgatctccgtatttgcgtgccatcacacgtgccagttcgcctacttcctcggtcagaacggccatattggtcagttcgctgaagtaacgtacaccatacgttttaatccagcggtccacttctttttgtgcttcttccagtgtcattattccttgtttttggtgtccatacatatagtaacaggaccgttgttcagaagttcaactttcatgtctgctccgaattctccggttcctacttctttgcccagaccgatgctcagttcttggcagaaataattatagagggggatggctacatcgtgctttgcagcacggatataggagggacggttgcctttttttgtagatgcgtgtagtgtgaattggctgatcaccaatatgttgcctcctacctctaggatagatttattcatgactccattttcatcgtcaaagactctcagtcctattatttttttgcataaccagtcggcatcttcttgtgtatcagcttcttcaatgccaaccaatatcatgaatccttcttttatcgccgatttgcatacgccttctatggtaacagaggcgtggcttactcgttgaataactactctcatatttatattctttaatttcttgttagaaaaattctagttgtttatcggtaatgtctccgcttctacaatggacaatatgttgccggcttcttgcctggactgatacgaggcagagcatgtccctgtagtagatgtatgcaaaggtaggaaatcccttttattctgtgagattttctttgatatttttagcggctgcttcacctaccacggctgcaatctcttccagtgaggcttgcctgatgcggctgacgcttttgaatgttttcagcagggcggtctttcttttttcgcctattcccttgatattgtccaaagcggacgccacctgactcttgcttcgtttgtcccggtggaaggtgatggcgaagcggtgtacctcgttctgtatgttttccaacagatggaacaagggagtgctttgcttcacaccgatggtcagcggagggaatccgtataacaattccgaggtacggtgcttgcggtctttggccagtccggctatggggatatccagatgaagttcgtcctctatcacttctctcaccacttccatttgcccctttccaccgtcggtaatgatgaggtcgggcaagggggaaccttcctctatggcacggctataccggcggcgtaccacctctttcatcgaggcgtaatcgtcgggtccggtcacagtcttgatgatgtatttccggtactccttcttgcttggtttcgcctttttgaaaacgacgcaggcggccaccgcgtccgagccttgaatattggaattatcgaaacattcgatgtggttcggtagttttttcatgtgcagctgctcctggatttctttcatcagacggacgcttctttgttcaggattcaacttttccgcctgtttcaagcggtccactttatactgtttcacgttcattacggaaagatccagcaaatgcttcttttctcctcgttggggaacggtaaaggatacattgttcatctccatatccagttcaaaaggtacgatgatttcgcgggaagtgctcttatatcgttcacgcatctcaataatgcccaattgtagaagttcttctttcgtttcgttcagacgtttcttgtattcgaaggtgaaggcttggttgatgcatccgtttgtgatatgcagatagttgatataggctgaattttcttccatttcaatggagaacacatccacattatgaatgatggaattaacgacttcgctcttggaacgatagttttctatcaagtcatatttctcttttattttctgtgcttcctcaaatttcatttcggcagcaagcgcttgcatctcttccatcagcaggtcacttacaatctgggtatctcctttcagaatatttttgatttcaccgatattcttcatgtattcctcgtgtgactgctgcccgatgcagggccctttgcagttctttatgtgatattccagacatacgttgaacttgccggcgcgaatgttttcgggacttagattgagtttgcaggtacggatggggtagagctttttgatcaagtccatcacggcaagcatggagggcatgtggctgtacggaccataataagaggacccgttgcggatgacttgccgggttttgaagatacgtgggaaatattcgttgcttacacaaatagaggggtaagtcttgtcatctttcagcaatacattgtaacgtggcttgtatttctttatcaggttgttttcgagtaaaagagcgtcttcttctgtttttaccacgatataacggatatctgcaattttgctgaccagtaatcgtgtcttgccgttggggtgttctctattaaaataagaagagactctgcgcttcaggttttttgcctttccaacgtagataatggttccttcggagttcaagtattggtaaatgccggggctgtcgggcaggtttagtacaattcctttcagataatcattggttgtaatctcttctttttccatacatgcttattgaatattgccggttggcagaactgtttcttgagttgatgttgcagccgcaacatcctatatctttcggttgtaacattatatatcttcaagctgtaacattatatatcttacagcctgaagatatatatctttcggtttcatcgtccatctcattccatagatctctttttattgtgaacgatgatggggcccgttttgatggacatgttgtgtgacactataaagtaagcagtgtatccaccgtgatatcttcggggaatgcctttctgccgttcagacctcccagttcgataatgaaattgatgaaaatctttttggcgccacatctttgtaccaagcgatgagtggccgccatggttccgccggtagccaataaatcatcgtgcagcagaaccacgtcgttctcatcgatggcgtctttatgtatctgaatggtgtcggttccatactcttttgcgtatgtttcctctactacttctgcgggaagtttgcccggcttgcgtgccatcacgaatccggcacctaaccgtgccgccagcgcaccacccataatgaagccacgcgattcaatacctactactttggtgatgcctttgtccttgtacatctcgtatagagtatctagtatttcctgcaagcattcggggtttttgaacagggttgtcacatcgtaaaacagaattcccggaatggggaaatctggaatttctcttaagtttgctttaagcgtttctttgctcataaccagtattttattgttagtctattaaattacttgtttcacgtgaaacataccttgtttcaccgtcccagcaggactagtaagacattgatgtcgctaggagagatacccggtatgcggctggcttgggccaaagtttcgggatctatcttcatcagtttctgccgggcttcggtagagagcgaattcaatgagttgtaatcgaacttgcctttgatgcggatggcttccagacgatgtatcttgtcggcgatcattcgttcgcggtcaatgtatccctggtatttgatcagcacttcggcagcttcaatcacttcttctttacggtcggtaatttggtccagcatggctttgaaagccggaatgtggccggctatattttcgatggtaatctgcggacggttcagcaggtcgattagtttgcagccgtgtgtcagacgggcagtacccaaactttccaaagcatcattgattaatgcggctttgatggagaaggttttggcaaagtcgatgatttggttcacggcttcccgtttgctgcaaagatgttcgtaacggtcttgttttaccagtcccagcttgtaggcgcgttcggtaaggcgcatatctgcatcgtcttgtcggagcaggatgcggtattcggcacgggaggtgaacatacgataaggttcgtccacaccttttgtaaccagatcgtcaatcaagacaccgatgtaggcctcgtcccgtcccagtgtgaacggttcgccaccgtggcaattgatgtgtgcgttgatgccggcaatgattccctgtccgcctgcttcttcgtaaccggtagttccgtttacttgtccggcaaggaacaggttcttgattattttcgattccaacgtatgtttcagttgggtggggtcgaagtaatcatattcgatggcgtatcccggacgatagactaccaagtccttaaatgcgggtactttctttaatgccgccaactgtatgtccatgggcagtgaagaagagaacccgttcaggtaaagttcctgtgtggtttctccttcgggttccaggaaaagctgatgttgcggcttgtcggggaaggttacgattttggtttctatactgggacaataacgcggtccgatgctttggatttgtccgttgaaaaggggagagtcgggcagacctttccgtagtatctcgtgtacctcttcgttggtaaagcaggtccagcattgcagttgtttcagtttgcgcggttcgctcatgaacgaaaagcgatggaagtcgttttctccgtcctgtgtttccatcaggtcgtagtgtacgctgcgcccgtctatgcggacaggcgtaccggtcttcatgcgtccggcggtgattccgtggcgggtgattgattcggtcagatggtaggaggcaggttcagccatgcgtcctcctgccagttgtttatgcccgatgtgcatcagcccgttcaggaaggttcctgcggtgagcacgatacatttagcatggaaagtcactccccagcaagtcatgactccagtcgcttcgccgttttccacgattagttcttctacggtatcttgccaaatgtgcagattgggagtattctccagaatctcgcgccatgcccagataaacttgccgcggtcacattgggcgcgggggctccacatagcgggacctttggagcggttgagcatacggaactgtatggctgtacggtctgtaaccagtcccatgtagccacctaatgcgtctatctctcttacgatttgtcccttggcgatgccacctacggcagggttacaactcatttgcccgattttgttcatatccatggtaatcaggcaggtcttcgaacccatgttggctgcggccgcggctgcttcacagcctgcgtgtccggcgcctattacaataacgtcgtacttaaaatccattgatttatttctttttaccgattgcaaaattacgaattttactctgtaaagcggtgataatacggttaaaaagaatgtgtggcggcagaaatctgtttctgccgccacatcatacaaacgctattcttaaagtaaactatttcctgttatttcttgtccggagcaggaggggtgtcggtcgggcgtttctttccgtccttgtctaccggttcaaaatcctctttctccggtttattctgtgcatttcctttcgaggaaggattgacaatgttctgataggtatcatgaatgggaagcttgtctagaatacccagtgcgggagccactttgctgaccacattctgcaagaaattggacgttgtgccgttgccaccgtcaaatacagtaacatttcccagttggatatgttcaaatgccttaacctgttccgaagcgatttccttccattggtcaaccatcttgtattggatggcgatttcgggattgcgctcggcagccttcaccatggcctcgaaaccttccgcttcggccagcaaggacttcttcttgccttccgcttctgcttccagtttcatctggatggccttggcttccgcctgtgctttggccaggatagcttccgcttctgcatttgccttacgttttatttgctcggccaatgcgtccgcatccaagatggcctgctgtttggctatttcggcaggaacaatcttatccgctttcaaggcctgttctactttgcgggctttcgcttcttctatttcacgctgtgcgttttcctgtgcggtgaggacggcagcttgtgtccgggcttgtgcttcaccggcttttctagaggcttccgccttggtaacttccagttccgcattactttcggcaacctctttggcagcgttattttgcccgatggccgatttcttttgtgcttccgcctgctttatttccatatcggattggagctctgccgtacggctttcctgttcggtacgcgcctgttccttgttcacctccatagaggcactggctttggcgatacgtgattctttttcggcattttcttctgctactttcgattcacgttccttgtcggctatggctactttaatttcctcgtcacgttgcgtatcggccagttgagtgttcttgtcgcggttggtttccgctactttggtggcacgttctttttgttgttccgcaatcttgatggcacccagtttctgttgttcttcaatgttagccaaggcttcgttcttggctttcgcttcggcttcttttcccagattgacgatataatcggcttcatcgcggatatcgctgatgttgatgttcattaggtaaagaccgaatttcttcaattcggagtcgatgttcttgcggcagttctcaaggaatgtatcacgatcactgttcagttgttcgatggtcatgtcggcaatgaccagacgcatttgtccgtaaacaacgtctttaatcagttcctgttgtgcttcgatattcagtcccagtaagcgttcggctgcattctgcataacttcgggctctgtgcttacggccacagtgatggtagtgggcacatctacgcggatgttttgtttggaaatggcaccagtcagtttgcagtcaatctgcatgggtttcatgttcaggaaagagtatccctggataatgggccatacaaaagcggctcctccgtgatacagtttagccgatttcttgtcgccggtcttaccatatactaccaatacctcgtcgctcttgcacttgcggtaacgacttaaaatcccgacgatggtcaggacgatgacagctaccagaatagctgcataaatgagaatctgctcatccataaatgattgcgtttttagggtttatttaatcaatataatagattccttccttgtaattcttcagtgtgaggatatcgccttcccggtagcttttaccctgtatgctccgcacggtaagttctctttgtgcgccattgatggcgatatagaccacatagtctgttcctgcctgttcttgttcttggcagcgggtatatatttcgcatttcctgcctattaattcttctccctgttcgggcttgttttcttgtttcagcttatagcagagtttataaatccaagccaggacgaagacaaaaaagctgccgcttatcacggcgcccaggtaatgtaagacaatgtagggaggctgacataaatacatgaaccaaccgaaacccatgcagaaatgaatcagtcctttgaaggagagtacgctgctcatgtctatatcggcgttgccatcggcattaacgtctatgtcggtgtccatactgccgaaaaagatggataagatgaattgcagaagaaagattcccgtacttactaatgcagcgaaaaaatatacgttagcttccatatattttgtgtttatctgtttttcaattcacaaaataaagcaattaatccgaaaaagcaagaagataagggaagaaatgtagctgtgcatgtacagctttcgatgttttttatccgtccggcggaaagttttcctaattatgggcatgtctttaaaaggttacgggcaatcattcttgcgaactatgcccgtagcttttataggttgttctgccttgtatgtcctgttatagggaaatcaatgccagcgctttgttttcggcggcttccataatctcccgttcaccggggcctttgtcgttgatgccgcacaagtgcaggataccatgaataatcacccggtgaagctcgcggtcgtagggttgctcaaattgttctgcattgctgcggacagtatccaagctgatgaataagtcgccggaaatacggtcgccttcacaatagtcgaaagtgatgatatccgtgtaataatcatgttgcagatactgtcggttcacttccagaattttatcgtccgaacagaagatataggcgatttctcccactctttttccatagcaggcggctacttctttaatccatccggtggtttctttctttttgatatcgggcatttttaccccttcggtttgataacttatcataggctgattatttttttataatgtacaaagataaggaaagtatttcagccgaagaaaagataacagataagaatagctgcaatgacccctgccgcatcggctagcagtccgcaaggaacggcgtggcgtgtcctcactattcctacgctgccgaaatataccgccagaatataaaaggtggtgtctgtggagccttggaagatacaggacagtctgcctacaaaggaatcgggaccgtatgtggtcatggcatctaccatcaaccctcgtgccccgcttccgctcaaaggtttcatcagcgccgtagggagcgctcctacgaaatcactgtcgataccgcatagctttacggcgttgccgataccgtcaatcaaatagtccatcgcacccgatgcacggaagactccgatacctaccagtatggctaccagataaggaatgatgcgcacggcggtgctgaatccttctttggccccttcgacaaaggagtcgtagacattgattctttttctgaaccctgccacaataaagccgatgatgataagaaatagaaagacattggcaaaggtagtggagtaaatatctatctgatctcgtgacaaggtattgaagaaataaataattcctgctaccagcaaactcattcctcctaaaaagaggaggatagtgcggttaaacagattgattctctgataaatacttactgctacaatgcctgccaaagtggagaagaaggttgccagcaggatgggtacaaatatatctgtaggttgggttgctcccagctgtgcacgatataccatgatgctgataggaatcagtgtaagccctgatgtattcagtaccagaaacatgatcatgggattgctggcagtatctttcttggagttcaattcttgcaggccctccattgctttcagtcctaagggagtggcggcattatccagccccagcatattggccgccaggttcataaagatactgcctgttactggatgtcctttgggaatatcgggaaaaagtttgctgaacagaggtcccagcaatcgggaaaacagagtgatgactccgccctgttcacctattctcatgatacccagccaaagagaaaggacaccggtcagtcccaatgaaatctcaaaagcggttttggaggaattgaaagtagagttgataatttcgggaaacacttgtgtgtcgcctaggaaaacgagtcgcatcaacgctgtcacgaaggctatcagaaaaaaggctatccaaatgtagttcaaaaccatatcgctagttttattagtaataactcggacaaaagtagtcaaattattcgtttttgaattagaaaagattcaattctcttatttttatttccaatctttgtttgaacacgatagcaaaatagtatgaaatgattttaagggcaaactactctctcatttgattatttcgatgaacgggacgagaaggaagcgtttaagcgattctcgcgagtttaaagaatatcaaaaagagtaaaaaagacgtttggtagtttgctatttgtcgggtatataaagaaaaatgttttttatggatttaaatatgctttgaaatggatactaatgaaatgtaaaataactcttggaataagtctgttctagaagaaacggataatataagaatcgaaatagttaggaaaaagagttttgttggtcggatctgataataaaaggttatatttgtgcaaatatgcagtgtgaattctgtagtagaaggagggcattgacgtaataacaagtaataagggggggatatatgatgaaaaccgaggaaataaaagattagttcaagcagtttgaaagtatcgtttgtgattatcatggagtaaagtgttggagtgtacgcgagttgtattccttattgggttatacccagtggagaaactttgagaccatcatcaataaagcgaaagctgcttgcacgaatgcaggtgaagatgtggcctaccattttgctgatgtcagcaaaatggtttctgtggggtctggtgtagaaagagagatagatgatatctatcttacccgttatgcctgttatttgactgctcaaaacggtgatgcgcgtaaaccggctatagcttttgctcaaaactactttgctgttcagacaaggcgtgcagaattggtggaacaacgtctgttggattatgagcgggttcaagcacggacagaattggctgaaacggaaaagctgttatcgggtgttctttatgaacgcggagtagatagtaaaggttttgccattatccgttcaaaaggagataaagccttgtttcgtcttgacacagcgttgctaaaacgtaaacttggtgcgcccgacagtcgtctgctggccgatttcttaccaaccatcagcattaaggcaaaagattttgctgccgagatggcttctattaacgtacaacaaaaagatctttatggacagtcatcaattgaaaaagaacatattgagaataatacggctgttcggaatatgatggtaagccggggaatctatccggaacaattgtcagcaggcgaagatttaaagaaagtggaacgccgtttgaaatcagaagaaaagaaaataactaagaaataatgaaggaaccgcttgaggagaaactataaatgagctgaaacggtttgctcactttcacatgcttcagtaaataattcttgtgatgtctggttaggcaaaatagagcttttagccatatactctttattattggcatagataaagagtacgcttcccccttttatcgtattgataataggtttggtcagtgcctgtggtaaagccggacaaccgaagcttcgtcccagtctgcctgatttgcagacggaagggttggcgtatgcggcgccatgaactacgatggcacgttcacgggcccggtcattgattcctttttccagcccgtccaataaaagggagtatccgtttctgccttgataagtgtttccggtaagatagaagccgagggaacttttataagagccgacttcgttggagaaagaggtagcatagttctcgccgctgtttttcccatgagagaccactgatgagtatagcatctttttctgttccatgtcaaagacaaacaaacgtttttcggtagagggtttggtgaaatcaatcaatgtcagtatggatttgcttttttgtttaatcaagctgtatcctgccacagcctgtcggaatgccaggaaattgaccacccctcccaattgcatatcttcgaataattgttcgccgtccattttttgaggtgcagggacagatgtagcaactttcttttcgggtgtagccgtccgggtcgatacattgctcgacggaaagaggaataggaacaggagtaaaaaagctttctgcatacgtatggaaaaactggataacgggtgcaaagttacgcacatttctattccaaaacaaatataatcgtctcattaacaggtgcccattcgaaaataaacttggcatgagaggtggcatttcttacacacatatgtgagcgggggatggtacccaacgtataactgtattctatgatccctgttgccggtgcattggtgggtactccgtgaatataaccaccattattgaaacggctggcgtaaggtgcaaaaccaccggtggcggcagaaccgtcttttagaaaaatcatcttggtctttttctcttgcagaacgaacatacccaatggagtttcttgggcgtatggaggacgatgttgtcctgttgtagcaggattcatgctacgtatcagccagtagcccttttctttccgttccaaagtagttatattctgattatggcggtctataaaaatagctttgttgaacactacgctgtcgggaatcagttttatatattttgtcggagcataccattcgccacctataaagacaggttctactttggtgaactttccttcctcacctaggtgacgggtaagaagtccatccagtccgtagcgttcggcagtaagggtgtcatctgttaggaaaaggggaattccctgatagcgttccactcccaatgtgtcggctatccgtttgtatgcatcccttttaaaacttttcactaaaggcgcttctccgttccggtttttataattctgtaagatgcaccattgtgccggcttttttcgaatattctccaacaatgctagccgctcctttattttctcccattggaaatggcgggtggtgtctttataaggataggtatccttcaaagtatgtttatcatacagcagttccttgtcaagcctgatgtcttcgggtttgatatctttttctacaatctcggtgatggcttctgtcacagtattgtgtacctctgttatcacttccttaatttcgctatttgctttcgaggtacacgagcagattgtacagaaaccggtcaataaatatatgaattctattcttttcatcatagacacaggtttgtggctttcttctacaaatataattctttaaaaggaataaacatgcgtttttgtttttaaatgcagtgaaaaattcctgtttctttgaacaatctcccctattgcataccttataaaggaccgctgggaataatcgtttatcttggcttgaggtttttacagaaaaaaagaatcaacttaaaaacaagtattatggtggaatcaactagagtaagaagtaaaagattatccttttcaggtaagaagacactgtcttcctttatgcaagtgaatattgccagtctgagacaatcgggaaaattgcgtaccagtgagacgtatagagctacactgaacagttttatgaaatttatggatggcaaggatgttctgttgagcaatatggatgccgagttgatgatggggtatgaaacttatttaaaggagcagggagcaagtatgaacaccgtttctttttatatgcgtattttgcgtgcaacgtataatcgtgcagtagataaaggggtgatcagacagcgttttccttttaagcacgtctatacgggagtggaaaaaacggtgaagcgggccatttcttttaaagtaatcagacaactgaaggagatggatttaagtcactctcagtcaatggagtttgcgcgtgatatgtttatgttcagcttttatacccggggaatgtcatttgtggacatggcttttcttaaaaaaacagatttaaataatggtatgctgacttatagaagaaagaaaaccggtcagttgctttccatcagatgggagaaatgcatgcaggatatagtggataaatatcccggaaactattcgacttatctgcttcctattataattcatatcaggaaagatgaaagattgcaatataaaaattcaatttgcttggtgaacagaaggctaaaagaaatagggaaaaagttggggcttgttcatcctttgactatgtatgtggcgcgccattcatgggccagtgttgccagaggcaaacatattcctctttctgtgataagtgaagggatgggacatgattcggaaaaaacgactttgatttatctggcagcattggataccaccgtgatagacaaagcgaatatggtggtgctgagggaattcttgtgataatagggtaaagatattgtttcttgtcaaaaagaggatatcatatcacaaggtatcctccatttgacgggatcagtgtgtctagtatttttttaataaatgtgtgtttgttctctctaaagatgatagcactttctgatgtggctgagttgaatatgtttgttgcaaggtcggcacagcctatgatctctttttattgttatcttttgtcagaagataccttatagtaaaggagaatcggattacagatagattttgaaacaattgccataaaccattatgctgttttcgtccacctatttgttatgaaaaaaatatcagcttccaaatattcaatatttttccgtaatatgacaattgtcataggtttgtttttttatgtgaattatagctgatacaactattttttaatagacaaacttgaataaaagaaaaggcaaagtttacttgggttttattctttgattttggagataatcctcttattacaagaactttatagaaaaaatactaagttggaatattatatatctcttattaagagatatataagagatctataacacattataaatcaacaaaatacattcacacaagaatactttgaaagactaaatcatgtattcagaaaacgttttttttgaatcaattattaaatttccttgctaaattgttctaattctcaaaactttgcttaaatttgcgacaaaatatatatctcttaataagagatctatcgtataactgatgacacgccatataataatgtatggttgtgaagatgttaaagcgaagattaaaagtaaataaaaatatggactatctattcttgagacgacacagacggactgctacttcgaataggcagaaaagcctgcttcttaaggctgctgaacgccagtgggaactacagttcgccaataaggggactgaagggagaaaggtggattgtgccctatataaatgtatattgtataaccttgaaataaagcaagtttttttggattcggagctttctttgaaaaagtttagcgttatgatagacaccaaccaaacttacctgtcgaatgtggtaaacaagtatttcaactgcaatttgaaggagttgctgaatacttaccgtgtggaatatgccaaagagttactccatgctgggaaatgttcattagaagaactcccacagcgatgtggctttgcctctagaagtgctttttatgcctcttttagtaaaatagtcggaatgtctcctttgcgctttctagctcgagaacagaataattcgctcttagaatcaatgatttatgtataatcaattttagttttttaaatttataaatttaaagtttttctattatgaacaaaaagtttttaagtgcaatcctgtttggtgccttgatggttacctcgacaggaacatttgtatcttgtaaggactatgatgatgacatcgacagcttgaacgagaaagtggacaagctgactaaagatttgtctgaattacaggccgcagctggaaaatatgtcacagctgtcaagtatgatgcggcaacaggtaagttgactgttaccggcggtaacggtgaaactttccaacttccgatgcctgctgaacttcccacttactctttgaaagttgtagatggtaagatacagttgttagatggtgacaaggtcgtttctgaagcacccctgcctacaactgatgctcctgcggcatttgatcctactttgttgaagtggaacaatggctatctgtattatggagatgtaaaaatctcaggtgtagagaaacctcaaagcgttggctctattacagaagtgaaagatgaagaaactggtgaggtgattggctatgtcattgaactagatggaaaatctgctacattctctttggttgctgatttgaaggcgttagtattccaacctgcattctattatcagggtattgaagcaatggaagctattggtcttaattataaaaccttgacagtagctaaagtagatgcagatggaaattatgataaggatgctcctgttgtaggtgaagcaactacaatgattccggacttggtagctgattatcatgtaaatcctaccgtagcgaaagttccaggtgatgtaaaagcatatactttcttgcgttatgacaagaattatactcgttctgctgcgacagctccgaaagtagtaaaaactaatgttacaaacggtaaggcccccaagggtatattgactgtaaatgctcattttacagatgctgatattaagaacattgaaaatgatgagcaagtaactgtattagctttgcaagtaagtaagggggataccgttgttacttctgattatgctgctgttaaggctgcttattacaaggacttggtattggcagctgtagatagtattcatgcaaatgaccgccacttgtttacaactgctgctgaagctattgctgataatgaacatgtttgcaagattgtctggaacagcaatggtatcgatattgctcgtttggtcaatactcacagaactaatatagataaagaaggtacacattcaaaatgggatgttcgtgctgctgatggtactgtagaaaaatatggtttcaaatattcttacgaattagttggttatcataaaggtaataacgaaacttcagaaagtgctcatgctgcattgaagggttctgttattcgtcctcagatgacaagtggtggtaagcagcaaccttggggatttactcagaataaagctacaaaagatcgtgaaccgttggttcgtgttatcttgactgatactattagcggaaaaatagcttctgttggttatttaaaattcaagattaccgatactgctaatcagaatgaagttgtattgaccccgaatttcccatttgccaatggttatactgttgattgtacagaaacagagactaaacttggtttgtcatggcatcaagttgaagaacagattctggctcaattggaagaaattggtatttctaaggatgaattccataagaatttcaaattggatggtgctgtagaagacgtagagcaacaagctttggtaaatgctactcagtatgatggaattactgttgattctaaggctgttactactccggttggtgtggtttcacagactaattgggatccggcggatgaaatgactgaagttttgacttgggtagttaagaataatcaggcatatcacatctttaaggctggtgctaagagtattgcagtaaatgtacgttatagctatgaagtatctgaaggtgtatatcaatatgtatatgttactttcacttggactcctagtcctttgaactttactcctaatggtaccattgaaaactctgctaagattgataaatattggtatgaaaagaacggtgctgtagcaggttctggttattcagatatccatgctaatgttcatcaagttgttagcgataactctaatgattgtacatttgatagcgaaatcttgaatactttcactggtaatgtgattaccgtgacaagtgacgctacttatcctgcatttgctaatgataagttgactaaggaagttgtatttgctaaccctcaagatcatttgactaagaagggaactgcttatgtcgtgaatggtgcttctggtgctcaatatgatatcactgtatctgctgatggaaaaactctacaagctactaataacgctgtaacaaaagcagttgttgttcttgctggaacagtgatggaatatcaagaaaatgattttgcaaaagatattttgaacaatgcagatcacaacttgctgggacaagaccagacatttactgctaaattgcaaattaatgctgctaactgcgattatgtagattatgctttgggtaacaacgtattctatgctaaatatttgcgtcctgtatcagtagatccgtcagatgtagatgaattaattgatgctactaatggtgcttctattgcaggcttgaccttgaatctgattgattggagagacaagtattttgataaagcagaagatactactggtgatgatggtaagaaatataatttctatggattttatggcgtaactaaagttgctgctgatattgaaaacgctacaacaactttgaatggtggaacattaggttctactaaattatcttctgtaacgaagaatgtaaaattgtatttcggtgaagataaatctacaaccaatgtatttactgctctgaaggttggcgataatggtaaattctattattacaataatggtactactttaggtaagtttacaatccgcgttccgctggaagttacttataagtggggtactatctataccgaagttgatttgaatatcaataagactattcagaactaatattgtaataactttgagtttaatttaaataagggccggccattcatagtggctggccttttttaataggaggaaagaatgaaatgaaaaaactgaaatttattttattgttgactgttttattaacaaccttttcttgtcaatcaggaaaacagaaggtgcaaagcaaagaagagaagagtattaatgaatttgtagctcatctaacggaagttgatacggttttgataacaaacctaataaatcaatttatggaatatgcgaaaaatggtcagctggaatctgccgcagctatgctttataaagccgattcggcagatgtttggaatgaacctattcaattggataacaatgaattgcatcaagtcgcaaaaatgatggaatcttttcctgtattaagttataagatagattatataaagttctatactcctgttaaaaacgaggtgaagtgcacgattgttatgcagaaaggagaaagtggaacacctattgcaactagtagttggtattttaagctgatgaattatttgggtggatggcggctttgtatgatgaattagctaatgatcgatttatataagcagtcgtgggaaaaagtgtcatttaaaaattattgaagggggtgtttgtttaggatatttatgtgattttcaatacaaaagattatagttataaattgtagcagggtcaaaagagaacggtttcttaggcttgtagtcgaaaagttgacagttcaaccagataatccggactgtcagcttctttttttgtgtccggagagatttcttctgtccggtaagttccctatggatccagatagcagtgcatttacccatagcaaggataacagcattacgataatctgtgaaagtatttctttcttaatcatattatacctgttccttttcaaaagttacgaaagagtgatcgcatgagtaagaaaaatcttactctgctgttttgtaagccttgtccatgctttgtatccgtcgtcttgcaccgaatatcttgtaacaggaatgaaactcctttgtcacgaaacctttaatagagtgtaactctcaagaaacctgacccatctacttttgcagcagatttataacgcataaaaaagtatatgaaaaaggttgttagagctgtgtctcttatgctgctgatggcaggtgtttgtggaaatgcatttgccgaggaaaatgaaaacattgtccggcaaggcgctatccgcggacgtgtgatagacaatggaaaacaaattctgccgggtgcttccatctttgttgaaaatctgaaaaccggagtaatcagtgatgtgaacggtttttatacgctgcccaatctgaaacccggaacttacacagttaaagtaacctacgtaggttatagccccattgaaatgaaagttaccgtccccgaaggcaagactttagaaaaagatatagtgatgaatgaaggggtggaactgcaggaagtgcaggtaaagggagcttttcaaggacagaagaaagcaatcaatacacaaaagaataatctgggtatcactaatgttgtatctgccgaccaggtagggaaatttcccgactcaaacataggtgatgcattgaaacgtatcagtggcatcaatgtgcaatacgatcaaggcgaggcccgtttcggacaggtccgcggcactagtgccgatttaagctccgtcaccattaacggcaaccgtgtcccatctgctgaaggggatacccgtaacgtgcagttggacttgattcctgccgatatgattcagaccatcgaagtaagcaaagtcgttacacccgatatggacggcgatgctatcggtggttccatcaatctggtaaccaaaaattctccttataaacgcactatcaatgctacagcgggaagtggttacaactggatcagcgagaaagcccagttgaacttaggtttcacttacggcgatcgtttcttcaatgacagactgggcatgctgctctccgcttcttatcagaatgctccttccggttcttatgatactgaattcatgtgggaacaaaatgaagatggcaaagtatatgtcagcgattatcagatgcgccagtactttgtcacccgtgaacgtcaaagttattcggcggcttttgattttgatatcaatgaaaaccataaattgactttcaaagggatcttcaacaaccgtaacgattgggaaaaccgttaccgtaccaatatcaaggatttggatgagaacggaaaaggcacagtccgcatccagaccaaagcaggtactcccgataatcgcaatgcccgtctggagcgtcagcgtaccatggatttcgctttgggcggagaacacttatggggggcaatcggtatggattggaatgccagttatgcaaaagctacggaagaacgccctaatgaacgttatcttgacttccaactgaaaaagcaggaatttgatatggacttgagtgatgaacgccagccgttggcaacacctggaacaggttctactttgacactgagtgataagttcagcttgaaggaactgacggaacaacaggaggacatcaaagaagaagatatgaaattctcggccaatttcaaggccagtttaaataatggagctaaactgaagttcggtgcgaaggtagtacgtaaaacaaaagagaaagaaatagacttctacgaatatactccgaaagacgaggatgccttcatgaccaacagcctgaaaaatacggtagaccagagtacggataagtttatgccgagcgacaaatatcaggtaggaacatttgccagtaaagaatatgtgggtggattgaatttaaatgatgcttcccagttcgataaagaacaggtacaagccgaattggctgagaactttgaggctcgtgaaactgtaagttccgggtatgtgcggtttgatcataaattcgcttccgatataaacctgatggcgggactccgtatggaacatacttctcttcgttataccggccgtaactatgatgatgagacagataagaccaccaagaccggccgcatgaccaacagttatgtgaatttccttccttctattttggtgaaatgggatgtaaatgatgatttcaagatacgcggttcttacacgcagaccttgagccggcccaaatattcagctttggttcccagtgtgaatatcaaccgtggtgataatgaaataaagattggtaattctgacttgaaaccgactatttcttataactttgatttgagtgccgattattatttcaagagtgtaggtttagtgagcgcaggttttttctataagaaaatagacgatttcatcgtagatcaggtactgaccaactatgaataccaaggaacagaatatacccgtttcactcagcccaagaatgcaggaaatgctaatctgtggggattggaattttcttatcagcgtgatttcggcttcattgctccggccttgaagtatgtgggtttctatggaacctatacttatacgcactcacgcgtggaggactttaacttcgaaggacgtgagaacgagagcgggttgagtttgccggggtctcccgagcatacggcgaatgcctctctttactttgaaaaaggaggcttgaatgtgcgcctgagctataactttgcatctgattttatcgatgaaatgggcccaagtacattttatgacagatattatgatgctgtgaactatatggatgtgaacgccagttatacctttggcaagaaggtgaaaatgaccttttatgctgaggcgaacaatctgctgaaccagccgctccgttattaccagggaacgaaggatcgtactatgcaggcagaatattatggcgtgagaatgaatgcaggtttaaaaataagtttctaaaaataagtatatgaaaacgttgatgatgattagaagaatgaaagaagtattgacatgggtatggattgccgtcattggtacggctatctgcctgaatgtgtgtgcccagactccgcaagattggaaaggactgaagaaacaactgaatttttatatggccaacgatttgggacgtaacggttattatgaccagaagcccatagccgagttgatgggagaaatggcggatgttattggtcccgagtgtgtatttgcagccggagacgtgcaccattttgaaggtgtgcgcagcgttaacgatccgctctggatgaccaactacgagttgatttacagtcatcccgagttgatgatagactggtttccgatcttgggaaatcatgaataccggggtaatacgcaggctgtgttggattataccaatgtgagtcgtcgctggtcgatgcctggtcgttattataccaaagtctttgagaagaaaggaactgccattcgttttgtgatgatagataccgctcctctgattgacaaataccgtaacgagagcgaaacttatccggatgcctgtaaacaagatatggatcagcaattggcatggatagattctgtactgactgttgccaaagaagattgggtagtcgtaatcggacatcatcccatttatgctgaaacgtcgaaagacgacagtgaacgcagcgatatgcagaagcgtctggatcctatcctccgtaaacataaggtggatatctatgcatgcggacacattcataacttccagcaccttcgtgtgccgggcagtgatatcgactatgtggtaaattcggctggttcgttgagccgtaaggtaaaaccagtggaaggcactctgttctgtagtcccgaaccgggcttttctatctttacggcagacaagaaagaactggatatgcacatgattgataagaaaggaaaagtaatctatactgtaaaacgcaccaaatagggatagttattttagggaaaaagagtacatttgcggtataaaactgtaaatgtactttttgttatgttgaatacactccttttgattggtggtctggctctcattttagctggcgcgaatggcttgacggatggttctgcagcggttgccaaacgtttccgtatttctgatttggtaatcgggcttaccattgtagctttcggcacttcggctcccgaattggttatcagtgtgctttctgcattgaatggcagtgctgaaatggctattggtaatgtggtgggtagtaatatattcaatgctttgatgattataggttgtactgccttggtactccccataaaagtaggtgaggggacgatgagtaaagagattccgttagtcattctttcttcgttggtactttttgtctgtgccaatgacatgatgctggacagggaagcggtcaatgttatcagccgttccgatgggtttgttctgctggctttcttccttatatttatgcgttatacatttgccatcgcccgtaatggggcagatgaggcaggagaggagcagaagataaaggaaatgcctgtatggaaatcggtgttgtatattgcaggagggctggccggactcatattcggcggacagctttttgtcgacggggcaagcgggcttgcccgttcatggggtgtcagtgaatcggtaatcggactgacattggtagccggaggtacttccttgccggagcttgccacatctgttacggcggctttaaagaagaatccgggaattgctatcggcaatgtcatcggtagtaatctgttcaatatattctttgttctggggtgcagcgctacggtgtcaccgcttccgatggggaatataaataacctcgatttaagtgtactgattgcttcctccctgttgttgtggctggtaggctggtttttccgcaaacgtaccataacccggcttgaaggcgcattgatggttggctgttatgtcgtttataccgcctatcttattgcccaacagtgaaaaagccataaaaagaataagttttctgcaaaaaaacttctatctttacaccccgaattttataaaaatacagcatggctattaccattaaaaaagtcagttcaaagaaagaactaaagacgtttatacggttcaactacgagttatacaaagagaatccctattccgtacccgatttgtacgatgatatgctgaatacgttcagcccgaagaagaatgccgctttcgagttttgtgaggcggagtattttctggcatataaggataacaaggtggtaggacgtattgcagggattataaataaacgcgcaaacgagacttggaataaaaaagaagttcgtttcggatggatcgattttctggatgatatcgaaatatcacgtgccttgttggatgcagtagcccaatggggtaaatcaaaaggtatggataccattcaggggcctttaggctttaccgactttgatgcggagggtatgctggtagaaggattcgaccagttgagcaccatggcgactatctataattatccttattacccacagcatatggagaagttgggattcgagaaggatgccgattgggtggaatataaaatttatattccggatgcaattcctgataagcataagcgtatcagtgacttgattcaacgtaagtttaacctgaaggtgaagaaatatacatcgggtaagaaaattgcggccgaatatggacaggctatattcgagttgatgaatgaggcttatgctccgctttatggtttctcggctttgtcgcaaggacagatcaaccagtatataaagatgtatttgcctattgtagatttgcgtatggtaaccttggtgaccgatgccgaagataaactggtggcagtggggatttcaatgccttctctgtccgaagcgttacaaaaagcgaagggacgtttgctgcctatgggatggtatcacctgttgaaagtgttgttcctgcataagtatcctcctatgttggatttgttgctggttgctgtaaaacctgagtatcagaacaaaggtgtcaatgctttgttattctcggacttgatccccgtatatcagcaactgggattcaagtatgccgaaagtaatccggaactggaactgaacggaaaggtgcaggcccagtgggaatatttcaagaccgagcagcataaacgccgtcgtgcttataaaaagagtattctgtgacaacgatatataaaaatgtgataagtcaatatggaagaaaacaacgaactgataaacaatcccgccgtagaatataccgacgataatatccgccacctcagtgacatggagcatgtgcgtacccgtcccggtatgtatattggaaagttgggtgacggatcacatgccgaggacggtatctacgttcttttgaaagaaattatcgataacagtatcgatgaatttaaaatgcaggcgggtaaaaagattgagattattattgaagaaaatctccgtgtcagcgtgcgtgattatggccggggtattccgcagggaaaactcattgaagctgttagtgtgttgaatacgggaggtaaatatgacagcaaggcgttcaagaagagcgtcggactgaatggggtcggtgtgaaagccgtcaatgcattgagctcacgtttcgaggtgcgcagctatcgtgatggaaaggtgcgtatcgctacctttgccaagggagacttgttgacggataccacacaagatacaacagaagagaacggtacttatattttctttgaaccggataacctgttgtttgagaactacagtttccgtccggagttcgtggaaaccatgctccgcaactatacctatctgaatacaggactggccattatctataacggtcagcgtatcctgtcccgtaacgggttggtggacttgcttaacgacaacatgacggctgtgggattatatcccatcatccacttgaaaggagaagatatcgagatcgcttttacgcataccggccagtatggtgaggagtattactcttttgtcaacggacagcacaccacgcagggaggtacgcatcaaagtgctttcaaagagcatatggcccgtaccatcaaggaatatttcaacaagaatatggactatgccgatatccgtaacggattggtagctgccattgccgttaatgtggaggaaccgttgttcgaaagtcagactaaaatcaagctgggctctaccaatatggctcccggtggtcctaccgttaataagtttgtaggtgattttgtaaagactgaggtcgataactatctgcacaaacatacggatgtggccgatgtgatgttgcagaagattcaagaatcggagaaagagcgtaaggctatagccggagtgaccaaactggcacgtgaacgtgccaaaaaggcaaatcttcataaccgtaagttgcgtgactgccgttttcacctgaatgatgccaaaggagacaagaaggaggaaagctgcattttcattaccgagggtgactcggcgagcggttctatcaccaagagccgtgatgtaaatactcaggcagtattcagtttgcgtggtaagccgttgaattcttacgggctgaccaagaagattgtatatgagaatgaagagtttaacttgcttcaggctgctctgaacatagaggacggtatggaaggattacgatataacaaagtgattgtggcaacagatgccgatgtggacggtatgcacatccgtttgttgctgattaccttcttcctgcaattcttccccgatttgataaagaaaggtcatgtatatattcttcagactcctttgttccgtgtccgtaaccgcaagaaaggagtttatgaaacggtatattgttattcggaagaagaacggattgccgcaatcgaacggttaagccccaatcccgaaatcacacggttcaaaggtttgggagagatttcacccgatgaattcaagcactttatcggcaaagatatgcgtttggagcaagtttccctccgcaagactgatctggtaaaggagttactggagttctacatgggtaagaacacgatggaacgtcagaattttattatagataaccttgttgtagaagaagatattgcgtgagtgaatcactaaaaaatatgagaagagcgatatttccgggaacctttgatccttttaccatcggtcattattcggtcgtgaagagagcgttgacttttatggacgaagtggtgatcggcatcggtatcaatgagaataagaaaacttggtttcctacagagaaacgagtggagatgatcgagaaactttttgcggatgatccccgggtaaaggtcgatgcttatgattgtctgaccattgactttgcccgagctaaggaggcgcagttcattgttcgtggtatccgtaccgtacacgattttgaatatgaggaaactatagccgatatcaaccggaaactggccggaatagaaacgattctgttgtttacggagccggaactaacctctatcagttctacgattgtaagagaattgttgcagtttggcaaagatgtgacgccattcttgcctgaaggaatgaaaatagactgaccatgaaatatactatgtattttgcaggcttgattgcctgctttttttctatcgtagccgcacaggctcaggagagtaaatttctgaattctccggcacgtaagttgcaactggcggaatttgccattgccaatctttatgtagacgaagtcaatgagggaaagctggtggaagaagctatcgtaaaaatgctggagcagcttgatcctcattctacctattctgattcggaggaagtgaagagaatgaacgagccgttgcagggaaacttcgaaggtatcggtatacagtttaatatggcggaggacactttgctggtgatacagcctgtatcgggcggaccgtccgaaaaagtcggtattctggccggtgatcgtatcgtcatggtggaagatacgctgatagccggtgtaaagatgagtaccgaggatattatgcgtcgtctccgtggtcctaaagattcaaaagtgaatctgaaaatacttcgccgaggggtgaaggaactgcttccctttacggtgaaaagggataaaatacctgtttacagcttggatgcttcctatatgattaaagataagatcggttatattcgtatcaaccgttttgccgccactacccatgaggagttcaagaaagcgctgaccgggttgcagaagaaaggaatgaaagacttgattcttgatttgcagggcaatggcggggggtatttgaatgctgctatcgatattgccaatgaatttttgggtaaaaaggaactgattgtctatacggagggccgtcgcaatcctcgtagcgagttttttgccaaaggtacgggcgagtttcagaacggtcgtctgatggtattggttgatgaattttctgcttctgccagtgagattgtgaccggagctgttcaggattgggacagaggagttgttgtgggccggcgcagttttggtaaaggcttggtgcagcgtcccattgatttgccggacggttcgatgatccgtctgacggtggcccgctattatacgcctgccggacgttgtatccagaaaccttacgaaagcattgaaaagtataatgaagacctgatagaccgttataataaaggagaaatgatgagtgaagacagcatccactttccggattcactgaagttcaagactcataggttggcccgtacggtatatggtggcggagggatcatgcccgattattttgtgccgattgatacgactctctatactaaataccatcgtcagttgcgtgataaaggagcgttgatgaaagctcatttccattttattgatgcccatcgtaaagaatggctgggcaaatacaagactttcaatgagttctacaaacgttttgaagtgactccggatatgttggcacaactggttgctaccggcaaggagatgggagtggaatataatgaagaagagtatcaaaaggccctgcctctgctgaggttgcagatgaaagcattgatagcccgtgatttatgggatatgaatgaatattatcacgtcattaatgacgcgaatgaaagtatcaggaaagcgctggaactgttggagcaaccggactttgaggggctgctgttgaaaaagcgatagtcaagactttatattaacagcagggacgcatagttgcactcctgcagttgtctgaaaaacttctgctgtgtcttcttttaggtgtggaataattttccaaccatcactttatctgtctcccgaacagcaccttattcagccatcggttcacatacacgttcacgaaagcacatcctactccgatagcggctcctgccactacatcactgggatagtgcaccccttggttcatccgggcaaaccctactccgcaagcccatacggctgaaggggcgataacataccacttaggataagtgatggagagtgaggtggctaaagaaaaagctgccgcagtgtgtcctgaagggaatgacggactatcggcatccggtgctccgtatgcatgaatcttatccggatactttacaaaaggccggtcacgacctattatatgtttggcggcgtatgtaatccccactgcttcaatcacactggttcctatgtaaatggcatctttcagcatcggctggtctttttttatcaatgcatagagtcccatggctgtaggtattcctacgggtagaatcactccgctagcggacaatccgcggctcagtccgtgtacatcccatcggttgatggttttcaacgtgttgatgtctatattctgtgcgctgaggctgaatgtaaaacaggctgtcagtataagaaaaataatcctttggcgtttcatttagtttggcatttgttcagtgcaaagatagaattgaaaatgaaaatatttatagtattgaatagaaaaactgtaaataaatgttttagagggcggtgtatagtcaatatcataaggataggcaattttctcggggtaattccatatattcacacgagtgttattccctaattttagtttggtggttgtgggattcaacccgcctctacaataaaaggatgctgaagatggcttttaatacactctttttcttttgtttaaaatacttatatttggctgtttaacaagctaaatacccatacataggtatttgacaagcgcaaatacctatgtatgggtattttaacagtgactaatatttccttaatttgcaaacaaatattaaatctaaaaactctattagaatgaaattatcttttattttaatcttgattcttttatttactgcatgtaaaaacgaatctgtcggtttattacaagaatctagtattactcatgcttcggttactaaaaatgcaaatacaacgaaacctcacggttttgaatgggaaagtaagtgtggagctttggaaagagtaatgcatactcgtgatgctctcagtggaaatagttatggttctatagcttattattatagacctataaatgcttccaagaccataattcaaactacaccggaagttgttgattctttaccacttcatacattgagtactacattaaaagcttctatttctttggctaatatagcaaatttcgaagaaaaatattcagcgtggaaaaagacatgggataatcctgatatagcaatttacagtgatcctaagaaatatactcagtcggaaaaatattctgacttgctacaattgtgcaaagattatggtaaggctagttggccattatttgttgagaaattaattgatggcgatatgcttacaattaatttaatagaggatctgactctttcggaaaataagagtttaatggatgaagttaaatatagtgccataaatgcaaagtcagcaactactcgtttgccgtctatgtattctaattatgtaaattattgtacaaaattactaaggagtaacagtataaacattcaaagctccattagacaaattaattgaaatatcatgagtacaaagtatttagttttgctttccttcttattcgtttccttggcagcatgcaatgatacggacaataaaataaaggaaaagggtaatctttcagtgtcagtaaacaatgatattaaagtctttaataaagaaactggtgaaatcgtattaagcactttatcagttgaagatataaatggactttcaggggcgtatttaaccttttatttggatgatttccctatttttgaatcaatacctgttatacctaaaagttcgagtattattcataatgatttagtacttgctatagatggggcaaaactatatttgcttgacgggtatccttcattggacgtacttggttccaataaatcagaagcagaacgattgaggaaggaaaattttaataaaagaaatacaagctggaacaaatttattgattacttgcaggaggttggaaagataatggaatagaaatattattttatgggagttgtgtcagcattttgacaacgtcatgatgactccgattcaatgcggattgttgtctgttttaggagcggattgaattcgctcctaaaatcttcattatataagcagagacgaatttgccgactaacatctccttctgctatcggtttacacgcttctaacagcttgttcatataaattaatttatcctctccaaaaagaagtaatatttatgaattcataacaaaatgagtttgaaaataacggcatttgttcagtgcaaagataggaaaataatgtaattcgcatttacccttccccgaattaaagaataatttccataattccttgtattatcgctagaattcctttacttttgcatcgtgaatacacagcttttaacagaatttttagttctaacaattaaataatttaaattcaatcatttatgtggttaagtaattcatctattggaaggaaagtggtgatgagtgtcacaggtatcgcccttgtcctgtttctgacgtttcacatggcgatgaaccttgttgcgctcttctcggaagatgcttacaacatgatttgtgaattcttgggagctaactggtacgcgttggttgcaactgccgggctggctgctctgtttgtaattcacatcatctacgctttctggttgaccatgcagaaccgtgcagctcgcggtagcgaacgttatgcagtgaacgttaaacctaaaactgtggaatgggcatctcagaacatgcttgtcctgggtattgttgtcattgccggattggctcttcattttgccaatttctggtacaaaatgcagtttgccgaaattatcggtgttcatgatttgggcgcattcggtcctacagacggtgccgcttacattcgtgaaacattcggatgccctgtatttacagtgctttacctcatttggttagcagctttgtggttccacctgactcacggattctggagtgctttgcagactttgggctggagcaataaaatctggttcgagcgttggaagactattggtaacatctactctactttggtagttcttggttttgcagcagtagtcgttatctacttcgtgaaatcactcgcttgtggtgcttgctaatcgtaaattgtaaatgataaaattgtaaatgaatatggctactatagattctaaaattcctgaaggcgctttagccgagaaatggaccaattataaagctcatcaaaaattggtaaaccctgccaacaaacgtcgtcttgacattattgtggtaggtaccggtttggcaggtgcttcggctgctgcttcactgggtgctctgggtttcaaggtattaaacttctgtatccaggactctccccgtcgtgcacactctattgctgcacagggaggtatcaatgctgctaagaattatcaaaatgatggtgactctgtttaccgtcttttctacgatacaatcaaaggtggtgactaccgtgcacgcgaagctaacgtttatcgtctggccgaagtgtcaaatgctatcatcgaccagtgcgtagctcaaggtgttcctttcgctcgcgaatacggtggtttgctggataaccgttcattcggtggtgctcaggtatcacgtacattctatgcccgcggtcaaaccggacagcagttgttgctgggtgcttattctgcattgagccgtgaagttcagcgtggtaacgtgaagttgtacactcgttatgagatgttggacgttgtgctgattaaggataacgaaggtgtggaacgcgcccgtggtatcatcgcccgtaatttggttacaggtaagattgaacgtttcgctgcccatgcggtagttatcggtaccggcggttatggtaatacttacttcttgtctaccaacgctatggcgtcaaatggttcggctgctatgcaggtttaccgcaaaggtgcttactttgccaatccttgctttgcacagatccacccgacctgtatccctgtacacggtgacaagcagtctaaactgactttgatgtccgagtcattgcgtaatgacggacgtatctgggttccgaaaaagctggaagatgccaaggcattgcaggcaggaactaagaaaccgaccgatattcctgatgcagaccgtgacttctacttggaacgccgttatccggcattcggtaacctggttccccgtgacgttgcttcacgtgctgcgaaagaacgttgcgacgccggtttcggtgtgaacaacacaggtctggccgtattccttgactttaaatacgctatcgaccgtctgggtgaagatgtagttcgtgcccgttacggtaacttgttcgatatgtacgaagaaatcactgacgaaaatccgtacaagactccgatgatgatattcccggctatccactatacgatgggtggtatctgggttgactatgaactgatgacttctatcaagggcttgtatgctatcggtgaagctaacttctctgaccacggtgcaaaccgtttgggtgcatctgcattgatgcagggattggctgacggttacttcgtattgccttatactatccagaactatttgtcagaccagattcaggttccccgtttctcgacagaccttcctgaatttgtggctgccgaaaaggctgtaaacgataagatccagaaactgatgaatatcaagggtcatcgttcggtagactctattcacaaggaactgggtcacatcatgtgggacttcgtaggtatgggacgtaccaaggaatctttgactactgctctggctaaactgaaagaagtaagaaagaccttctggagcgaccttcgcattccgggtgaagctaatgaattgaatgtggaacttgaaaaggcaatccgcttggctgatttcatcgaaatcggtgagctgatggcttacgatgcattgaaccgtgaggaatcttgtggtggtcacttccgtgaagaacaccagactccggagggtgaagcgcttcgtcacgatgacaagttctcgtatgtagcttgctggaaatacacaggtgaaggaaaagaacccgaattgatcaaggaagatttgaactatcagttcgttaaggttcaaactcgtaactataagtcttaattattaattgtatagaaatcatggataaaaatataagtttcacactgaaagtttggcgtcagaaaggtcctaaggataaaggacattttgataccttccaaatgaaagatattccgggtgatacctcattcctggaaatgatggatatcttgaacgagcagcttatcaatgaaggtaaagaacctatcgtattcgaccacgactgtcgtgaaggtatctgcggtatgtgctctatgtatatcaacggacatcctcacggacctgctacaggtgctactacctgccagatttatatgcgtcgtttcaaagacggtgacaccattactgttgagccttggcgttctgccggtttcccggtaatccgcgacttgatggtagaccgcagcgcatacgacaagattatgcaggcgggtggttacgtgtcaatcaataccggtggtattcctgacgctaacgcaattcctattgcaaaacctattgccgatgaggctatggatgctgctgcatgtatcggttgtggtgcttgtgttgctgcatgtaagaatggttctgctatgttgtttgtttctgcaaaggtcagccagttggcactgttacctcaaggtaaagtggaagctgcacgccgtgcgaaagctatgttgagcaaaatggatgaattgggctttggtaactgtacaaacactcgtgcttgtgaggcagaatgtccgaagctggtttctatcagcaacattgctcgtttgaaccgtgaatttattgctgcgaagctgaaagactaattacggttagttttacttgatatttgagagtgccctgccttttggcggggcattttttttataattatgtattgggtgaagtttcttccttttcttttttacggatgtttctgggagagtcgccaaaggacttcttacagaagttggaaaaatgtgagagagattcaaatccatgtccaaagcagatttcggagatggaagcatctgtatagcgcaattggtaaaggatactttctttgcgctgtttcatcatccattcataggccggttcgttgaagatggctttgaaaatgcggcggaaggtggtgacgctgtagccgcccagttgtgcgaactcctctacggactttatttgtttgtggtgctttaatatgaaatattcaaaactgctggtgtattgggataggctgtgtacaacaggagatagctcatagtctgtgtaatagtgcgccaacagataataaagttctttacgcttgaattcgagcagctctttacaaattttgtctgcattcagataggaagcaaccccttcaaggaaaagctttatttcgggctttattttcagtggctcggagatgagtggcggaggcacgtttttcaatatataggtatagcggtcatagcagaaggctttagggtcatcaaatgtgtacagaataccttccgagtctgtcatggccagtatttccacttttgatgcgatagcttgcagcacaaattctccggaattgatgatggttccggcatattcttcactattgattaatatttgacctttgagtaagaaaaataaaatattggtttcacacttatgtgggggtaagtggaaaccttttttgttatgtgtgtaatggatgctgttctccactgctttagggcattgggtacaatccatcctttcattacagggcagaccagacatatatagatgttagaaacgcttgtgttcttttggttgatttgacaaatgtaggtcaaatatggataatttgcaataagtttcaggaaaaagaccgaagaatcctgtttccacttgtttgtcttctgccgttacggaaaacgatagcctgtgggcgtgagcatagagggctaaatttgtgtggccaaacacaaagaagttacaattgttgggaaagtagcagaaagaaagtatctttgtgtgtatccatggggaggtataccggctaaaacagcatagattatggaatgtgtagtatcatcctccaatttctccggtatcattggcgagctgcataactatcgcatatactttttgaggacggttgattgacaacaggtaaaaatgctccgcaaatgaaatcgcaaatcatggtggggatgatacggtgtttcattgcggagcaggaaattgttatgttcttatcaggaaattataattggcctgacaaatggatgtgatttatttattgggctcaattgggctaggttggggatcttcatttgtccacccatccgcttgggctgtaaatgttaattcttcagcaccggcaggtaatgttaacgtataaagtatttttttgcctatatcccatgttccggttaatgtggcttcttttgttccttcaaatactttgccattatcattagtcgtggaataagtaacagtaatcttgactgacgatagatcattctgagggattaacattaatgcattactgcttgtcgcaatttcgcttgttgctgtaccgtcaatttcagagtaggtagcattatatgtatattcttcattgccagtttgagcgctccatgcacctttatctgcgttataagtataagtaccgctatttgcaactcctgataattttatagatgtaacattgtatttgaatcctgtgtctttaccttggagcttgaaattaatctgagttaaaatatgattgaatgttaaatctacacttccaacagaggttgcactattggtttttgctttatctgttacacaggcggctagtaaatctgtctgtatcgtctgaagagtatacgtgaaactcgggtaagtaccggttgtggcataatttgtaataccgccggcttcaggtgagtaagcaaaaaattgtaaattttcggctattggccaataatatggaccatctgctacggaccagttagagttagtacaagttgcttttttcccattaataaatgttgttgttaagctacctgctgttactttgtccattgtaattgttttagtattataggcgtaaagtatgaaaccttgggattccaagttttcagttgtagcttctgcagctctggatgacttcccaactacgcttcggaaattaatttccgttttttgtgtcggagcttcaatttcttcattctgtgagcaacttgtgattgccagtgcagctaaagctgcaaataaaatcttcttcatattctgtgtgttttaagttaataattctatgactctttattttatatcttaaccaaccggtaattccacattcgtttcatcgtcccagtcactaacgctcccatcaaatccaccgccactttcatctggaggaacctctacatcatccactacaattttctcgtcatctggaagctcaatctctatctcggactcttgaggtttttcatcaccttctcccggctcgtcttcaggaggttttaccgcttccgttatttccactttcgcttcttgtctggaaccatccacccttactatgatcagattcagaaactgagtgatatcagctcttgcctgcgtcagttcgggatgtccgaaacaggtgaaactcccttttataaccccattccctttaccggtttcacaataaatgggagcgaagcggcataagccggctcctttacctaaatggtaacattcagccattccggaaacactgccaatgatcgatgagacatttttcagcccctctgtctttattgaaaagatgtaagtggttaccacagattttggtcttacctctagtgtcggtaactcttctccttttcctatctctacatcgtccagggttgccacataaaaattatccggtccccataccatgttttctgtttcgctgttgcccaatcccgtgcagtttcctgtacacgccattatcgtttcgtaactgtcttcgccttttacttgcactacttcggtgtcataattgtaaatcactgccaagtaatgccccgggggcactttcatttctccgccttttgccggcaagtaagtatcaatctttcttccttgggcgtccttgggatagaaaataacccggattccttccggcagacggccggttactccttcccaatccaaacggatatttattcctgttacgggataatcgtccagaatctcgcgtcggctgcatcccactaaagtcaatagtgaagataaaagtacaagagctacgtaccttgtctttttcattttcttcctctcttctttgttatcacccataccaacgaaatttttgctttcgtagggcctataaaggtgtaattcccgctactcatccaaactagtgacccttcatagggagtgtacttttgatattccgtggtcaggtagcctatgcccaggctgaattccaatgccagatgccgtgacactgaagtggaatatccataagtgaatcctgccgcaccgtaatatttaccttggtagccgtctcctttaaactgaaagtcgtagatacctccttcggcatacaatccaaagaaatgtccgttcaaccggtgatgcagttcacggttgcccagccagtagcggctttctattcctcccgaaatcagctggtagcagatttctttgctactgttggaccaccaggggcttttatattccaggttcactgaccaccgctttcctacaggaatttctatttctatattaggcgccagtgccaggtcgtacaataaattatttttcagtgcaagcactgtgttgccggctgtcttgtctcttcttgctgccttttctttgggcttttttccccgtttttcttttgtttctttttccttttctgcctttgttactgttttttctgtttctgttattacttgtctcctttccttttgtgggagtgcttgcaccgccattggcgcaatggtcgtttccctgtcaatcggaatgaattcagtttcttctatcatggccgcctgttccgtggaggagttttttccttccttttcttccggataagacaggcagactcttatttttgtccgtctgagctccggtagcagccggttggaaatatattgataaggtatgccggcatccagatgttgcaagaaatcttgcatttttacaggattgtcatggtgataatctatcaatgccaatacatcctcccggtcggggaccagcctgtcgtccgttatcagtttccgtaaggcatccccgtattcttctcctgtacggatacagatttgggcggcattgacttgcggatatttccgacataagaacgcttttacttcctcgcttctttttaggcccggcgctatgtccggttctttttttccgttatatgaatccggcgaaaccagaataatggaataaagatgtctgctgcgggcaggatgggcaagcagggaatccaatgttgccagcgttttaccgtttccttggtaatccttgtccgcctgtcgggccttcaggtcaaaatagagcatcatgtccaatatggtatctcttggattttcgtactctgtcgtccgggcataagtgctattggtcagtaggcacaaaaacacaaatatgctgaatatagtagtgcgtttttccatggattaccattatgtgtggagcaaatataggtgataaaatctgaaaaaaaacttattaaatgttctattttcggacgtgaaagggttagtgaagcgattggacagaatttgcaagtttgggcagccggataatgagaagggcaggggagcttacttttatttggagtgaataatcagaggaatactttctttttgctttttactttccaatggacagaaatgaacggtcttatcatatggatagggcaatgtttcatattccttttttaatccgtgtttttcaatctaattgtaatgttgtgtgcgaaaacggttgtatttgtgaaataatactaaatgaaaagcgaaattgaactaaatatttggagaaaatgagtgtaagttgtacatttgtcatgtgatttttttcatagtattagatttaaggttaacaaaggttggagcaaagcgttgctccttttccttttttaagcccttcgcttttgttcttttcctgcctgtcaagtttcctgtcttttaaaatattcagcttcttgttttcatccatcggattttatgttatctttgtgtcaatgtaattaattgacaatctaaatgaaaagacacgcaaaccttttatgcttgggagctgctgttgcattactgaatgcctgcgctccggctgtgaatgctcctgaacctgttttccccattcctgaaaagaaacaggtggattggcagaaaatggagacatacgctttcgtacatttcggactgaacacgttcaatgatcgtgaatggggatatggagattccgatcctgctacattcaatcctgtcaaactggactgcgaacaatgggtgaaaacctttgtggcggcagggatgaaaggagttatccttacggcaaaacatcatgacggattttgcctgtggcctacggggctgaccgaatactgtatccgtaacacgccttataaagacggaaaaggggatatagtgcgtgatctttcggaagcttgcaagaagtatggtataaaattcgctgtctatctctcaccgtgggacaggcatcaggccaattatggaactccggaatatgtggattatttctatcgacagttgtacgagttgctgaccaattatggtccggtgtttgaaatctggtttgacggggccaatggcggtgatggctggtatggcggagtaaaagattcccgtaccatagaccggaagacttactatgactatgcgcgtgcctatgaaatgattgacaagtttcagccgcaggctgttgtattctcggatggcggtcccggatgccgctgggtaggtaacgagaatggatttgccggagcgacaaactggtctttcttgcgtgccggagaggtttatccgggatatcctaagtatagggaactgcaatacggacatgcggacggcaatcagtggacggctgccgagtgtgatgtgtctatccgtccgggctggttttatcatccggaggaggacgaccgggtgaagacggtggagcaattgacagacctttattaccgcagtgtggggcataatgcgactttattgcttaatttccccgtaaaccgggatggattgattcaccctacagattcggcgaatgctgttgatttttataagaatgtacagaaacagttggcaaacaatctgttgaaaggtgttcttccggtagtttccaatgaacggggtggaaaatatacggcaaaggcggtgacggatggagagtatgatacatattgggctacggaggatagcgtcacatcggctgttatcgagtttgaatggccggccccgcagaaggtaaaccgtatgctgttgcaggaatacattccgttgggacagcgtgtacagtcctttgtggtggaatataataaggaaggggagtggctgcctgtgaaactgaatgaagaaactactacaatcggttataaacgtttgcttcgttttgagactgtcactacggacaaacttcgcgtgaactttgagaaatcacgcgcctgcctgtgtatcaataatatagaggcttattatgcaggagaaacccttgatgtgtttacagcaaaagcggaggaactgaaaacatatccgtttacattgccgaaggtagatgaagcggaagccggaaaatgtgcggataaagatgccgccactacttgctttgtggacggcaatacgcttctggtggatttaggtacggaacagactgtttcttctttccattatttacccgaccagagcgagtataacaaaggactgatagctgcctatgagatttcagtcggcacggaagccggtgcggtgaaccaggtggtgagcagcggggaattctcgaacatcaagaacaatccgattctccaatcggtctacttcagtccggtaacagccagatatgtgctgttgaaagcagtgcggatggtggaaaatgacggaccgatgggctttgccgaactaggagtgcaataaccatgcatcaatatactcatgtacccgttcacggtacagctaccgtatgtcaatgggtatatgagtatcttgatacatggttacattattaaccggtacactcctcctgccagtgctcgtatcacccctttcatttctaattcaaacagtaatgcactcattcggtttacaggtatgttggtgtctatcaccaatgtgttgatttgtaatccttccggcattttgccgagtcgttttactattcgttcctcttcctcgcttaaatcagggaacaattcccgttgtactgttttctcggttttggagctgctttcccatcccatggccttcactaaatcttcggctgatgtgataagcactgcctggttttttcttatcagattgttgcagcctatggaatattcatcattgcatcgtcccggaaaggcaaaacagtcccggtgataactttccgccagttcggcggtgatgagggctccccctttggcggcggattcgataacgacggtagcgtcactcatacctgccacaatgcggtttcgtttcacgaaattctgcctgtcgggattggttccgcttgtaaattcggtcagtaaccctccctgttccaacatgctgacggctgtcttccgatgttcggcaggataaatacggtccagtccgtgtgccagcacgcctatggtcttgaaatgattctgcagggcggcgcgatgcgcatggatatcaatgccataagccagcccgctcactatcaaggcgtttgggcacaatgccgacaagtcggcaaggaaacgggtgcagatatcctgtccgtagggggtggcatgacgggttcctaccatgttgatgacatgcagtgcattcagatcggcatttccccggtaaaataaagctagcggagcatcatcacattcacgcaaacggccgggataaccttcatcatttaaggtgaggcagcggatatgatttttctcacagaaagtaagttcctgctctgcacgccggaaagcttcggagttattcaacgcagtaatgatcttttcgcttactccggggaccagttgtgacagctctttgcggtgttcgaaaacacgggtggcgcttcccagactgctcaccagtctgaatgcgcctgtcagtcccaatcccggtatccgggtcagggccaggctgcaaatttgttcgtcttgtgtcattcgctcagatagggggcgaaagtctcgtcaaatagagcgctgtcccctaatctgccgtttaccacgcatactgattctacagtggccttgacagtcactttcatgtcgggcagacggaaaatgtcctgatagaacacatatttaataccttcttttttcagatagagcttggacacgaattcgtcaccgctgcgcagcggagttttgaacgccatggtgagcctcgccactaccgggtccactccttcttcgtgcaagcgtgcgaaactgatgcccaccgatgtgagaaactcatggcgcgtatgttccagataatgttgatagttggcattgttcacaataccctgcaggtcgcattcataatcgcgtaccttcatcttcagttcataaatatacttttccataaggcaaaggtataagaaaaatgtgttactttgcagataaacttaaaaaaagaaacaaatgaaactgtacgctgcccctttgcaaggttttacggaagccccctggagaaatcttcatcaggaagtttttggtgggatagatgcttattataccccctttgtgcggatggagaaaggagagttccgtaacaaggatgtacgggagatcgcttctgaaaacaatactgtgtcccggctgattccccagcttatcgcttccactcctgccgaactggaacggctggccggtttgtttatagagaaagggtacaaggaagcggatatcaatatgggttgtccttttcccctgatgacagggaaacataagggttcgggcattttgccgtatccggccgaggtggaagctttattgaaagagctggtgcactatccggaactgggtttctccgtcaagatgagattgggatgggagtgtgcggatgaatggcggccgttgttgcctttgttgaacgctgcccccttgcggcggatcgttctgcatcctcgtatcgggaagcaacagtacaaaggagaggtggacttggctgcgttcaccgctttctatgaggagtgcgcccatccgttggtgtataacggtgacttgctgacggtggaagatatccggaaggtggacgaggagtttccccgcctggagggcgtcatgctgggacgcgggttgctggccaatcctgctttggcttgggaatatgcaaacggaaccgttttttctcccgatgagctgcatgaaaaggtgaaggcgcttcacgcacgccttcttcaatattatgaagcccatttacagggagaggcgcaattgctgagtaaaatgaagccttattgggaatacctgctgcccgatgcggaccggaagataaagaaagcgataaagaaggctacaacgatggataagtatttgacggcggtgaaccagctgtaatgattgaaaaggggcttcggtacatgaaaaccggagtgtctcttcagttcattcagccggtctaactgcttgtaaaatagggaagtatcctgataggagaaccttcagcttcctgtcagttacttccagcccatatttttgttcctacctgttagatgagaggtgcgtccgtcatgcctgtattttaagaaatacttagctgtcttttcttggagcatatcctttatcttccttgttatgtatccagttgcttccgtaagcattcggcctcgtgcgtgttttttccccctcttttccttcctacctttgtggcttcattataatcttaatccattatgtgttcagtattagaattttctagcgaaagtgataaactacgtactctcttttccgagtctaaccattttgattctgttcttttcatatttgatggcggccgtcgttataaagtttcgtcttccagccttggtatccattcccctcaggacctacttctccctttaggtcttggccttttccgcagcagtcctttttggtcttattacctttatccccaaggttgtaatttccataaaggtattgacggtctttgtggcgaggtcatccgacacacgggttcctgcgtgtcagagcagagctgtcatatttttcccgaccgctcccgtagcaggttgcatatcctttatcggtgcgacgacgaataccgtctggaatgccgtcgtctgaatcgcggttctttcctcttgaaaaaggaggaacggaagaaggattttcttcaaatttcctggaatcgcctgaatgagctgcttactgttaaaaagtatcggaaaacagttgaaaagtaattccccattctataagccgtgcagttttattttgataactttgccacataataaaaagtggatgtacagtgaaagaaccggttattacccttactttggaagagtacgaagagttgcgcaaggaacatgaatgccttgaaaaggagcatgcggaacttcagagaaaatacgaagcctctttgcaggagtattcccgccaggtcgaagaaatctcggcctgtacagccgtcattgccgatctgagatggaaattggctgacttgacacgccgtttatggggtaaatccagtgaaaaacgtcatcttcccgaagatgccggccagctgagcatctgtttcgagtctccgtccgatgtcaatgacccggtagcggaagaacagaaaaccgctgggaaatccgtcacatcggagaatggctacaatcgtttccgtaaaagcttcacgaaaaagatcactccccacgcccgtaagcccatcgacccgtcccttccccgtgaggagattatcattcccatgccggaaggcctttcgttggagggagcgacgaagctgggagaggaagtgagcgaacagtatgctgtcagtcccgcccgattctatgtgaaacgcatcatccgtcctaaataccggctcgccgacggtcgtatcataaccgctcccatgcccgtaatggcacatccccacagcaatgcctcggaaagtgtactggcccacattgctaccgccaaatattacgaccacctgcctctgcacagacagctggatatctttgagcgtgaaggaatccatctgagtccttccaccgtaagtaactggatgatggctgccgcacagcgtctggaaccaatctataatgaacttcgtgaactggtcaaggacagctattacgtcatggccgatgagacaccccatcccgtacttgaaagcgaccggcccggtgctcttcaccgcgggtatatgtggaacttctatctgccccggttccatacccccttctttgaatatcacaagggccgtggcagcagcggaatagacacactgctggcaggacaggtccgggtggtacagagtgacggctttgcagtatatgacaagttcgacacgctacccggaaagttgcatctgtgctgctgggcgcacgtcaggcgcaactttgtggaagcggaaggaaatgaccctcccagagcaaggcatgcacttggaaaaataggcggactgtatgccgtggaggagaaaatcagaatggaacatctggaaggggaggcggtggtaaagcttcgccgggaaaaatcgtaccctattatcaaagaactggaaaaatggtgcaaggaggaatatggacatacggtcgataaatcgcctattgccaaggccatgttctatatgtacacacgctttgaacaactgtccggatatgtcaatgacgcacagttctgcattgacaataatccggtggagcgttctataaggccgttgactttaaacagaaaaaatacgctcttctccggatcacatgaggcagcacatgcagcggcaattttcttttcactgatgggatgctgtagggaaaataaggtgaacccaaaactatggatgcaggacgtgctgattagggtacaggagaaagaaagagaagagaaaaacgattacaccgatttactgccatttaattggaaaggataaacaggaaagctataataaagtcaaaagccagacatgcttcgtctggcttttgactttattataacttggagagaaacacgcacgaggccgaatgcttacttactccccgctagatttctactgggtcgaaaaaaagggcgtgccaaaagccatgtttattatttagaccttttggcacaccctcttggtggattctgaaatcagtttcttatttcttctctgccgcggcatgtggatagtcaatcgtataatgcagtccgcgactctctttccgttccattgcctgacgggtgatcaaatacccgatgttaatcatgttacgcagttcgcaaagttcgcgtgaagccttacagcgtttgaaaagacgctcggtttcttcatataaaatatccaatcggttccaagcacggattaatcgcgtattactgcgcacaatacctacataagcttccataatctggttcacctctttcatgctttgggttatcagtacccgttcttcattgttcatggttccttcatcgttccattcggggatatcctcattgaagtcataccggtcgagtacatttagtgcatgtttggctgccgcgtccgcataaaccactgcttctatcagcgaattggaagccagacggttacctccgtgcagaccggtacatgaacattcgccgatagcatacaaacggttgatgctgctctgtccgtccagatcgactttgatacctccgcacagataatgagcagccggagccacaggaatatagtccttagtaatatcaatgcctaggctgaggcattttttataaatattggggaaatgtttttttgtttcttccggatctttatgcgtcacatccagatatacatgatcttcaccgcgctgcttcatttcgttatcaatggcacgtgctacgatatcacgtggggccaatgacaggcgtggatcatatttttgcatgaattcttcgccactttgattctttaagacagcaccgtaaccgcgcatggcttcggtgatgaggaaactgggacggtctcccggatggaagagggcggtgggatggaattgtataaattccatgtcctttactgctcctttggcacggtacaccatagcaatgccgtctcccgtagctactagtggattggttgtattgcggtataccgcttcgcatccgcctgttgccattacagttactttggacaggaacgtatccacttctcctgttttctcattcaatacgtaagcaccgaaacatttgatgcctggtgtatggcgggtgacgataattcccaaatgatgctgggtaatgatttctaccgcatagtgatctgtaaatatggtaatattgggatgagcttttaccgcttctatcaagctggtttgtatttcagctcctgtattgtctttgtggtgcaggatacggaactcggaatggcctccttctttgtggaggtcgaattctccatcctcttttttatcaaaatccactccccattttatcagttcctggatttgtgcaggtgcttctcgcactactttttctacagccgcgcggtcactgatccaatcgccggcaatcatcgtgtcttcaatgtgtttctcgaaattgtctactttcaagttggtaacagatgctatacctccctgagcaaaataggtattggcttcttccagtcctgctttacaaatcagggcgactttacctttgtgagctactttcagtgcgaagctcattccggcaagtcctgagccgataacaaggaaatcgaattttttaaccatgataatatgctttatgggtgcaaagctacgaaaaacctttattcattgtaccttttgctcttgtttttactatttttttcgtgaagaataaacgaaatagataatgcaagtatgaaattaaaagtgtaactttctgcatttttaaatagaataggatggaaaacaataaagaaatcattcacgaaagtgaggtaaaagaacttataattgagttgaggggtgagaaagtactgatagaccgggatgtagctaagctttatggcgtagaaaccagggatataaataaagcagtaaaaaataatgcagataaattccctgaaaattactgttttagcttgcaattatctgaaaaacaggaactggtggaaaatttccaccggttagaaagtttgaagtattcaaccgttgtccccaaagcttttacagaacggggattgtatatgttggctactatattaaaaggtccgagagctaccgcaactacttttgccattatcgaatcattctttaagttaaggacattagtacggaatgtaaatatcatggctaccgagtatgatgaggaaaagaggaagagtctggtacaacgtagtggagaactgctgaatgaactgctgactgatgagggtgatataacagaaacggaatcttctatcgaattaaatttgtatgctttgaagatgaaacgtacagtaaagaggacaaaaaaaggataaattctcttattctgcgccgtaatgaggtcgataaacgataaatttattatctttcgggcaaattacaataagatgatgaatcgaatttttcatgtgaagatagcaggaggcacttatctgtttctgatactgctgacagccgtcatggtatttgctttctggtgtatgaaggcaatgataggattggtggtggcattggggctgatcattaccattgaacgtattatccattctacttatacgctgactgcggatggaaagctggtggtgtattatggtcgtttttataaagggaagaccattcccttgactgacattacggatgtggagctgaaacgaagttccggattcggtggaattatgccttcgaaatatgtattgatacattatgagaagaaaaatttattgtcattggttcctgtaaagccggaagaatttatcaatgcgttggtgaagcggctggagcataggatagaggaggaataatgttgaaggttttgaacagataaaaactaattaacccaaaataaataccatgaaatatcaaattgcaatcatcggtggaggtcccgcagggtatactgctgccgaagctgccggaaaggcaggactgagtgttgtattgttcgaaaaaagaagtctgggcggtgtctgcctgaatgagggatgtattcctaccaagaccttgctttattcggctaaagtatatgattatgcgaaacatgcttcaaagtatgccgtgaatgtgtctgaagcttcttttgatttaggaaagattgtggcgcgtaaatcaaaggtggttcgtaagctggtattgggaatcaaggcaaaactgactgcgcatcaggtaaatatagtaacgggagaagccacgattgtagataagaataccatccaatgcggtggggaaacctacgaatgtgagaatttgctgctgtgtaccggcagtgaaacatttattcctcctattccgggagtggaaaacgtggattactggacgcaccgtgatgcactggataataaagaagtacctgcttcattgactattgtcggcggtggagtgatcggtatggaatttgcttctttcttcaccagtttgggagtacaggtgactgtggtcgaaatgttggatgaaatcctgggtggcatggataaagagctgtcggccatgctccgggctgaatatgccaaaaaaggaatcaagttcctgctcagtacgaaagtagtaggggtatccaaaggggagaccggtattactgtgtcatacgaaaatgcagatggagcaggaactgttacagctgataagttattgatgagtgtaggccgtcgtccggtgacaaaaggtttcggactggaaaatctgaatttggaatggacggaacgcagatgcatcaaagtagatgaacatttgcaatcttctgtccccggtgtctatgtatgcggtgatttgaacggagtctctttgttggcacataccgccgtgcgtgaggcggaagtggctgtccatcatattacaggtaaggaagatgcgatgagttatcgtgccataccgggtgtggtctatacaaatcctgagattgccggggtaggtatgagcgaggaagctttgcaggccgcaggtattccttatcgagccgttaagttgccgatggcttactccgggcgttttgtagccgagaatgaaggagtgaacggtgtctgcaaagttttggcagccgaagacggtactgtattgggagcgcatatgttgggtaatcctgcttccgagctgattgtattggcaggtatggctattgaggatggtaagaccatagaggattggaaacgatatgtattccctcatcctactgtgggtgagatattcagggaactataatgaaacgagttttatttttctttttactgattttatctattcacttcataaacgcccagccgctatctcagcggctggacgctttactgcatgaggaagttctgaaaacatccgaagtgggtattgccgtattcgatctgaccaccgggaaatccgtttaccgttatcaggacgagaaactataccgtcctgcttctgttgagaagataatcacttcggttaccgccttggcgcaactgggagcggattataccatggataccggtctccgttatcgtggaaagatagaaaatgacacgttgaaaggcagtctgtatctgataggcggttttgatccggaatttatggacgaggatctggaccgtctggtagatgcgttggcaagtcaaggcatccgttatgtgacagacacccttgcggcggatgtttccatgacagactcggtttattggggttccggctggtgttgggacgatactccttactccttccagccctatctttcccctctcatgctgaataggggctgcgtggatgtatcggtttctcctgctcagaaggactcgttgcctaaagtcgtttgtacgccggtttccgattattatcaggttcataatcacggggtgagccgtaatccgcaagccgggaagctgaaaatcacccgcaactggctcagcaatggcaatatcattaccgtttccggaaatgtttcttatccctatactgagaaattgaatgtatatacttccaaagatttctttttccatacctttgtcagccgtttgcgcagcaaaggaattgaagcgcgaacttgcacgtatgccgattgtcctgtaacggccgacagtatagttacgctttataccgtccgaagaccactcaaggaagtgttggaaagagctttgaagaaaagtgataacctgtgcgccgaatcaatgttttatcatttggctgccaagcgttccctgcataaacgggtgacgggagaagatggaaccgatgccattcacgcctttatgaaaacagctttagggtttaacccggagaactataagatagcggacggcagcggtgtttccgtttataattatatctctccacgtttactgttggagtatttgaaatatgcctactatcatcgggaaatttttcttcctttctatgagtccctgcccatagccggagtggacggtactttacaaaaccggatgaagcagaccaaggcccgtggaaatgtgcatgcaaaaacaggttctgtaaccggagtcagctcgctggcaggctatgtaaaagctgctgacggacatcaactggcctttgttatcatcaatcagaatgtactgaaattaagccgggcgcgtgcgttccaagataagttttgtgatattttatctcgttgaatttgagtttttgaatgttctgaaacgtattaagtagcagattttgcatataataggacaaaatttatacctattctgaacgatttttgcagcatcggaacaagattgtttcgtaactttgcccaagtcgaaataattcggaatactataaaaacataaaatagctgcttatgaagacaaattatgaaatccgttatgccgcgcatcccgaagatgccaaaggctatgacacccaaaggatacgacgggatttcttaatggaaaaagtattttcggacaatgaggtgaacatggtttattccatgtatgaccgcatgattgtaggaggagccagacccgtaggggaggtattgaagctggaggctatcgatccgttgaaagcgccttatttccttacccgccgtgaaatggggatcttcaatgtgggcggtcccggtgtggtcaaagccggagatgccgtgttcgaactggattataaagaagcgctttatctgggttcgggagaccgggaagtgacttttgaaagtaaagatgtcaagaaccctgccaaattctattttaactctgttaccgctcatcgtaactatcccgataaaaaagtgaccaaggcagatgccatcgttgctgaaatgggttcattggaagggtccaaccatcgttgcatcaacaagatgctggtcagtcaggtattgcctacctgccagttgcagatgggaatgaccgaactgaaaccgggaagtgtgtggaacaccatgccggcgcacgtgcacagccgccgtatggaagcctacttctatttcgaagtgcccgatgaacacgctgtttgccattttatgggagaagtggatgaaacccgtcatatatggatgaaaggcgatcaggcagtcttgtctcccgaatggtctatccatagtgcggcggcaacacacaactatacctttatctggggtatgggtggagagaatctggattacggtgatcaggacttctcattgattacagacttgaaataaatcatataacttcattaatttaataatataagtatcatgaatcagtatttgaatttttctttggaaggtaaagtagctcttgtaacaggcgcttcttatggtatcggttttgctattgcatctgcttttgcagaacagggcgcaaccatctgtttcaacgacatcaatcaggaattggtggataaaggtctggcttcttacgctgaaaaaggaatcaaggcacacggatatgtatgcgatgttactgacgaacctgccgtacaggctatggttgccactattgcaaaagaagtaggtaccatcgatattcttgtaaacaatgccggtattatccgtcgcgttccgatgcacgagatggaagctgccgatttccgccgtgttattgatattgacttgaatgctccgttcattgtttctaaagcggttttgcctgcgatgatggaaaaaggacacggaaaaatcatcaatatctgctctatgatgtctgagttgggtcgtgaaaccgtttctgcatacgctgccgctaaaggtggtttgaagatgttgacccgtaacatctgttctgaatacggagaatacaacattcagtgtaatggtatcggtccgggctatatcgctactccgcaaacagctccgttacgtgaaatccagcccgatggaagtcgtcatccgtttgatacattcatctgtgccaagactccggccggccgttggttggatccgcaggaattgaccggtcctgccgtattccttgcatccgaagcatctaatgccgtcaatggccatattctctatgtagatggcggtattctggcctacattggtaagcagcctaaataattagtagatataaatagaaagaatctgcttgtgtctttgttgatacttgcagattctttgtatttttgtctttcagttcgacaaacaataaatagtatgaaaaaaatctttttagcagtcgcaacggcgttagctatgttttcctgttcgcaaaaggagccggtgactgtcactataaccaatccgctttccattgacagaaatggggaaatggtggaaatctctatggctgaaataacaggcaaactacaattacccgatacggcacaggttatcgtattggacgagaacgggcttgaagtaccttatcagataacatacgatgatatgcttatctttcctgcttcggtgaaaggggatgcctcggctgtttatacaattgcagaaggaactccgcagccggtggatgtggttgcttgcgggcgtcaatatcccgaacgtttggatgatgtggcatgggagaatgaccgtgccgcttatcgtgcatacggtcctgctttgcaggagaagggcgagcgtgcctttggttatgatatctggactaaaagtgtgtccgaaccggtagtggaggatcgttatgacggtgacttgaaccggggtatttcttatcatgtagatcatggaaacggaatggactgctatgcagtgggcccgactctgggtggaggaacagctgctttattccctgatagtaccattgtttatccctattgttacaaggattgtgaaatcttggataacggtccgctccgattcacagctaagttggtctataatccgttggttgtaaaaggggattcaagtgtgatagaaacgcgtatcatttctttggacaaggggtcgcagttgaacaagactgtggtttcttttgacaatttgcaggaaatcactccggtggtgaccggcattgtattgcacaaacagaatcctatgggatatagttttgatgcagacgcaggctatatagcttatgcagactctacggagaatgctgccaataacaatggagtgatttacataggagccgtattcccggctaccgtcaaaggagcgtttgcccaagtgttctccgaaaaggaacggaaggaacgtggggatgctttgggccatgtgttggcggttaatgattatgaaccgggagccgagtatatttattattggggatcaggctggagcaaatatggtttcgaagccgataccgattggaataaatatttggaagaatatgcccggaagatacgtaatccattggcagttgccataaaataatacatatacaagagggtatgcgtatacgccacgaaaaaaacaaggtatttggctttatcagtcaaataccttgaattcatagccttgttccaacagccattctatggcccggggcaaggcgtatttcatgtttttctctgccttgatggagtcatggaaagtaatgatggagccattcctcacataatgttttaccttcctcagtacctgtcttccattcagcttgttgctatagtcacgggtaaccaagtcccacattacaatctggtatttatgccgcagcaccatgtactgcatccagcgcatgtggccatgtggcggacggaacaggttggtatggatcagctcgtttgctttgtccgtattggccagatagttcttgcttcggtattcgaatccccggatatggttaaaagtatgatttcccaaacgatgtccccgttctacaatcatctggaattccttgggatgcttgcgcacattgtcgcccaccaaaaagaaggtagccttgatattgtacttgtctaataaatcgagtacccacggtgtgatttcgggaatcggcccgtcatcgaaagtcagatagaccgctttttcattcttgtccattcgccagaaggcgcgtggataaagccagcggagtatcagcgggggttgttctataaacatgaatgtgtgtgcttttgttggttatacaaatataaaggtgtggattcaccgcagaatccacaccttttatttactttctgcctgctccgccgcctacacgtttgttgaacacctcatagaggtcttcaaacttcttggcatagtggcttgccatatctgattttttctgttgttcaccttcaccttgtacaccgccggcagcatttgcgcgggcaaggctcttgttgatctcatccagaatatagaaattgcgcagacagtcctcgtatgaaccttgcaggcgttggtcatccagactcaggtaccaggtgatgtattccaccgatttgtttgccagatcattcagaatggcttctcccttttctttttcacctaacgccagataatcgtcggccatttcttttgaactgctcatgatgtaatcgtggggcacggtggtgcttgggattacttccgaacagtagtcaagggctttcaacgccttgtctttcttgccttcttttatcaactgggtagccagctgtataaacatacggcggtgggtctggcacatacgcatcacagtctcgtcgatatagatatccgggttgttgattcctccgaacttgaacttgttcatcaggttatcgtacattttctcgctgtcgatgcgtgcgttcagccgggtggtgttgaacggggtgatgcggtaggcaagaccttcctgcatgaagttgttgcccaaattcagatgattgtcgctacccaccgtaatagccatatacaacggacgttcccagttggtatttgccagcatctcaagcatcatcagctcgctcttgtacagcatacgtttgcctttcagggagatactcatgtaatcggggatttcaccatgcagggagtcgggaatcatcatgcccgagcgtttcactgcctccttgtccagcttgatgacgatgctgtccgtcggtatcagctgtaaaccttctttgggtgagcgtacccagtatttcagaatatttttcaattcatacgggttgtctccgaattccttggcggcttcttccgggttctgcttgtagaagttattgatgctttccatcacttccggacgtacagccactccttcattatgcccctgtacatattccagacggctccattcgataggcactgccggggagtcgtatgcctgacgcttcatttggtcgatgtaccagtccgtttgcaggtaactcaggttgcatacacgtacatcggtacggaaaccttccgtttcctggttgtaccacaaggggaaagtatcgttgtcaccattggtaaagataatcgggttaccttcttcctgtacggtgctcaggtagttttgtccgaagtcgcgtgccacataacggttgctgcggtcgtggtcgtcccacgtctggctcaccatttggatgggtacgaacagacaaactacagttgcaatgacggaagccggtttctcacccagtttgccttgcagccattgggcaatacccgccacacccatgcctatccagatggcaaatgcatagaacgaacctgcgtatgcatagtcacgttcgcggggctgcatcggggtctggttcaaataaagcacgatggccagaccggtcatgaagaacaggaagaatacgatccagaattgctggatacctaccggttcttctatctcttccccattcggagtcgtgatacgttttgtcttgtaagcctgccagaacagaccgataagtcccagaatcaacggcaggcaatagaatacattgtgccctttgttgtttttcaggtcggaggggagcaggctttggtcgcccaccaggaacttgtccacaaacggtattccggtaatccagttgccatgttctatttcaccctgtccctgtatgtcattctggcgtccggcaaagttccacatgaaatatctccagtacatgtagttcaactggtagataaagaagaacttgatgttatcccattgggtcgggactttcaccatcaccatctgtccgcactggtcgtaaggaacctgcacgcctttgatgccgcccagccagtcttcgtaggcctgtgcgtgtgcatcgctgtacatgcgcgggaagagcatattttgtgcatacttgtaatcggtcttatgacgcactacttcgtagctgtccttttcatcgggagtcgctttctccttccgttgatacacgggagcgccttctgtcacgtcatatacacatcctccgtccacttctttcagtgccggtttggaggcgtatgtctgtccgtagaacaaaggacgggttccatattgctcgcggcccaggtattctcctaaagtgaagatgtcttccggagagttctggtccatcggagtattggcggtagagcggatcacaatcaaggcgtatgaggagtatcctaccataatcatcatgatgcacagcaaagaggtgtttaaagtacgtgcgctaatctgatatttcttgttcaaatcagcaaacagataaacgcccaagattcctagtatgataatgcctatcaaggcgctgctccatccgtagccatagaaggggatgcccagcatggcgatagttaccatgaaggaaatattcatgcgtttgcggctcttttccgtatagctttcgtaaacaccccagataatggatgcggcgagtagaatgatgtagactatcagaccgctgttgaaaggcataccgaaactgttgacgaacagcagttcgaaccatcctcccacttttactacgcccggcacgataccgtacagcactgctgcaaccaacaccatggagcctgtaagtgccagcagactgcctttgaggttggcatcgggattctttttataatagtacaccagtacaatggccggaatacacaataagttcagcaagtgcacaccgatggaaagtccggtcaggtaagcaatcagaaccagccagcggtcgctgtgaggctcgttggcaacggattcccattttaaaatcaaccagaatacgactgcggtgaagaggctggagtaagcgtatacctcgccttctacggcactgaaccagaaggtgtcgctccatgtataagccaaggctcccaccagtcctgaccccataatggtaatgagtttgcccaaggtcatctctttgtcatcggggcatatcagttttttcaccagatgggttatactccagaaaaggaacaggatacaagccgcactcatcagagcgctcatggtattgaccattctggctacttgactggggtcgcttgtaaattggctgaataagttggcggtaagcataaagaagggtgcaccgggcgggtggcctacctctaatttatagccggtggtgatgaactccggacaatcccagaaactggctgtcggttctatagtcatgcagtaagtataagctgcgatgacaaaagctaaccaacctaccaggttgttgactaatttgtactgtttcatgaatatattattgtttcgttaacgttcaatgggcgcaaagatacgaaagaaagttggaatagggaggcaatggtctgttatttagtgttatccttagggaatgcggcagaaaatgtttctttcagtccttaacggaatttctatgttttattgctggtttgtatactgtgttctgaaatttcagtttgtacagatgaaggaaacctttggattcctaacctttttctactctatggttaagcttgattgatggttaggttaaggtcttttatacggtaaaccagtatagaccgctacagtggactgtacagtctgctatagtagtccgtacggtctgttgcagtggactgtacggagcactgccggcgactgtagaagtctgccgtaagaaaatgcttaatgataaggtggatagggcttaacctgccgcatgaaaaggcttaggtcacgataatcggatttattcgtcgtgatgatggcatttcaagatgcggtgagggaagttcccatgtcctaacagttcgatggggcatccgaaatgctcttccagccattcggtgggtacttccgtatcgggatgataatccagcgtttcgttgacgcacgctatggtttttacattttgcagcacagtgcctatgtcatggcttaccaggatgatggcccgttccttgttgatttcttccagcagggagtagagtttggcctcaaaccgtttgtcaatgtaggtattgggttcgtccagaatgacaacctcagggtttgaaaccaaggcgcgtcccaagagcgcgcgttgcagttgtcctccgctcagttcgccgatggcacggctttccaaaccttccagacccatgcgggcaataatccggctcaccagttcgtgctgttcgggggtgtagcggtggaacagggacttctgtttgttgagccccgataataccacctcatatacggagatggggaatttcttgtcaatactgttgtattgtggtaagtatcccatggctatttcgggtacttctttttcgttcttatagaaacggacactgcccgaagcgggcttcagtaaccctagtatgatcttgatcagtgtggtttttccgccaccattggggccgattacaccaaggaagtcacgttcatataccgtgagattgacgtgactcagtactgtcttctcatcgtaagaagcggaaatatctgtaagttgtataatgggattcgtcataaggctctgttatttggcaagtgcatttgctacattgatcatctcttcccgccattcataacttagcggattaatgggaacaacggtgactcccagttcatctgctatcagccgggcattgcgggtatcgaattcctgttggacaaaaataacccgggcattgtcccggcggcaggtttctatcagttctttcagatgggcgggtgagggttcctttcctccttcttctatgctgatttgctttaatccgtagtccctagcaaaataactgagtgccggatgatagataaggaaagtggtatcggcattctgtagccggtcacgaacgtccgtatctgtctgtgcgataatttgttgcagactgtccagccgatgcttgaaataaggttcgtttgcactgtccagttcactcagggcggagtagatattacgggcgattactgaggcattgcgtgcggagttccatatatgaggctctatacccccttcgtgatgatggtcaccgtggttgtgtcctgtttcgtgtatgacgtctattccttttgaggtatcgaatactttcagatgaggggcattcgtggtcagtttatccatccaggcttgttcgaaaccgatatagccgatgcgcaggtaggcggtgcttttatccagattgaccagttgttggggggtagggtcgtaggtttcggggctgcttcctttcggaaccatgctgactatcttgaatttatcgcctgcaatggtttctgtgaaatagcgcaagggctccagggtgacagtcagggtcggttttgtggaagtggactgtttactgtcacaggcggtaaacaggcacactatcagtaccatgcagcacgaacaaaggatacttttgccgggatgcaatggggaaaatatgtgatgtctggttctcatgaatgttatcttttctgtttaacaacaacaaatatacgcaaattgctcattaatcaggtacaaatactccccaaattgctcaattgataagcaatttcagtctggttagggcttttcatacggctattctgtggctgtatgagaagccttggtttcaggtaagagattctatatggcattctatgtactctttattgttctctataaatatgcgctttatattgggtgggaagtgtcttgtcgtttgtcaatctttttaagatgccatataaggctcttgtattcgtgaagaataagatttgtaaaaaaatcctttcaatctttgttcatgtatttatcttactatatgttaagagaaggaataggaactgattgtggatgattgaaaatcaatgggttattgtatgtatggaagatgaaaaaagtataaatctcttagtaagagatcgacatttcacgtgcaaaaataaggaaagttttgataactagtacacttttcgcggaaaaaatatggaatattgtgaaaaaaagtttttcttctggttctaccggctctgatttaatcttgtatctgtatagttaatattttgatttaaagcctgttatcgtctgtttgtagatctcttactaagagatctgcataaaaggccaataagaacgaataacgagtttagatggaatacctgtttctgagacgtaaaaagacgagcagcacttctgtaaggcagaagacattgctctatcgtgccgccggtcgcgaatggacagcgcggttctcgtcactgtcggatgtccgtccggcagacagccttatatataaaggtatattgtatcagttggagatacgccgggcgttcctcgattcctctctttcgttaaagaaactgagtatgatgctcgaaacaaaccagacttacctgagcaatgcggtgaaccgctacttcggttgtcatctgaaggagttgcttaaccgctaccgggtggaatacgctaaggagctgcttcgcaacggcggttgtccgctgggcgaggttccgtcacggagcggtttcggttcgaagagccctttctatctggctttcgtccgtcagacgggtatgactccgaaacggtatgcggcgcgcgagaggaacctggtgaacttggaaatagagaatgaagtccttttataacagtatatgtataaccaatttttagttttttaaatttataaatttaaatctttatttatgaacaaaaagtttttaagtgcagttctgttcggagccttgatggtttcgtcaacaggaacatttgtgtcttgtaaagactatgatgaggacattgaccgcatcgacaaggaactggtcgatatcaagtcagctctttcagctttacaggcaaaagttgatgctggtaagtatgttaccaacgtagtgaagaacggtgacggtatcactgtaacctggagtgacaattctacaagtaccattgaaactatcaaaggtgacaagggtgaagacggtaagaatggtacagttgtgaccatcattgacggttactgggcatttgatggtgtgaaatctgaatatcctgcaaaaggagataagggtgacaagggtgaccagggcgaaccgggtgatgctgccgctgccggacatgatgcaaagattagcgaaaacggttactggatggtatgggataccgaaaaggctgcatacgttgaaacagaatatattgccggtggtgcggtagctgcacaagtaaaaggtggctggaacattactgtaaaggatgaaaatggtgatgaacagactatttttattccgagcagtgctactatgggttatatggatgtcttgaatggtgctaatccgatgcatgcactttatggaatcaatgagaaggatgttgagtacggaccagccaaaaaaactttgaagaaaggtttgtacaccactcttgatcgcgacttggaagttgtggttaatcctcagggaacagatgcttctgcttattcattcaacttgatgaactctgccaatgtggatacagaattgccgtttaaggatgctgttccgtttaagggtgtattgactagagccacttctgaaaatgcagtatgggtattgcctcatgactttgtccgttatgaaaatattgatgatgccagaacgaagaactatctgttgttcaaggctaatgacggtgcaaaacacgctttgtctctgactgctactttgaatgaaacaataatcaaaactccgtatgatttgagtgctcagttgaagaagattggcgaagttaatgtaggtttgcgcaacttggaaaattgtgcagttaatgtagattatactcctattgtttcttatatttctccgtctgtagatgcagctgctgtatatgactactggattactttggaacaatctgccaagaacttgaagaacgcacagttgtatggtgtggaaatagataaagaaggtcatagcttcaagttcacaagagaaacaggagtaaataactacattgagtttgtttacaactacattttgatggacggtactatcgtacaaggcgataaagatgcgcctcacttctttgcttatcagcgtgaagaaatggcaaatgctcatgaaattactttggaacgtctgtatactccgatggatgctaagttaattgttgaaaacgacaaggatcctaattataatcctgaactgagacctactactggttcttggtctgctaatgagaagcaagtatttgctcttaatactaaggcttattcattggataaaataatcaatgaaatgagtgctatagaaaaggctgtatggaagagtgccgttgaagctggacgcattgatttcgaattgattggtggtgaaggcgaaaacaatgaatattgggataactggacaaaagggtataatgttcgttatgctattgtggacaacaccataacattccagttcgttgtatctgaaggatatccgtataacttcactttgaagaacgcttatcagttgactttgacagtgaaagatgaagacaccaacacacctgttgcttcgatcatcttgccattcgaattcactcagccgactttggatattactcgtgtaaacggtgagaaggctatctggaatgacaagaagaatgtattgagcatttatggtgacttggtaaaagaaggcgatgtagaaattatgagtgttccattctatgaagcatttactactgcatatgctaaacaatatactgtatttggttctacagctcagtactatactttgagccataatgaaaatgtagataattggtttacttattccggttatgaagtgttaggtcaagattatgctacgagacttcagaatattcctttgactaatatcgtatattcaagtcttgcaaaagaatggaatacacgtactcttgttggaaatgtaactactggagaagctaatcttccgatagttgccaactacaggttctacggagtatatccggcaactaaggaacaagtatcagactttactctgagattcgctagcttgctgggtgacgctaagaaggtagaagctaagaaagaatttacttctaacaatgtaactcgtgaagtggttctgacagatgctgactttactttggtggatgctttggatgatacattctatctgttcgacggtgttaaggctgacggcaatgtggacaagcgttctgatatgaacctccgtcaaggatttgaagaaggtactgaaggattcgctacaaacttcacgctggctaatgctaatgcatctgcatactattacaagaacggtaacaaatttgctatccctgtttctgtaggtacggttaacactaatgctaaattcgtaactaatgctaataccaagaccagagcttgggaaccaggcactatcagtgcaacaaatgttatcgttacagatcttggtgctaacgaagctgtgaagagtgaaggctatgctgctgttcctggtggtatcatgatccagttgccttctagcattggtactacagaacctgttactatcgaattcaaactgaaagatgtattcggtgtaactaagactctgaaagtagttgttaaggctgcaaaataaacttggttaaaaaactgcttccctctcgtgggggagcggtttcttctaaacaaatgaatttatcaggaaacgatacaatcccaattcggataaagttcattttttcagcaagataagactttctccgacaggagaatcttatataataaaaactttagatttataaaacagaatctctggcttgtgacaagccggagattttttatgtatataacggcaatcatctcagcgtggagaaagaatatgaagaatctatgacggattcagcgatgaatgtttcatggtaattcgctgataaatatgcagttatgcgtatatgacggatttgaaggattttacaacggttttactgttttaggtgaaacttgaccattcatcagtttcggtcctagaagtttaatcagacttggttgcccgcagtatctcgcgttttccccccggagggccgggaaggcgttctactgtgaatccggctgtttgcagcatccttcttaccacccctttggcacagtaagttgtcaggatacctccttcattcaataccttgtataaagtatcgaaaagagattgttcccacatttcgggttgtttttcgggagcgaaggcatcaaagtagatgatatcgtataagggaacggcgggacggctgccttcctccgggttgaaaagccgggtaaaatcatcttcaattttatgtaatgtgaaccaaggggatacctctgtttctgtgttccagggcgcccggtgaatggcgtaataatcctcctcatgctgtttgccgatcaggcgggggtagtccagttgcttcaaggtttcttcggctaacggatagcgttcgataccggtataatgtactttccgtcgggtctcttctgctgaaagcagtgtcagaaaggcattcagccctgttcctagtcctatctccagaatgtggggctcggaaacgggagaatgctttaatcccatttcgataaaaatatgttgtgactccgtcagtgcccctttcaccgaatgataatgttcgtccagttcgggtacatagagggtataacttccatctgctgtttgttccagtttcataattttaatgcattaaagcggaggcttccaatactccccataccaataaggcgtagcggagtatctttccgatggtcatagcgagaatgacaatccatatattggcacgcatcatgcccaatacaatggatatggcacttcccaaaatagggataaaggcgaagaaagccatccaggcaccccgtccgtgtacaaaccgctccgcacggtccatcttctctttttttacatgaaaatatttctcgatccattccatattgcccagatgtcccatccagtagcaggtcatgcctccggcaacattgccggcggtggcggcggttatactgatcaccgggtctaagcccaacggacctacacaggctgccaatacggcctccgaactgaaggggagaacacttccggctataaaagagcctagaaaaagaccccaatatccccagtcgatcaggaattgaagaattgcatccataaattgtatatagttagaactattaatagaacaaatgtaatgatgaaaaagatgccggtaaagcggttgtgggttaaagtaaataaatgtcctgttaaaatggatcctacaatgacctgcatctgcaacaggatgtcgaaatgctgtggctgtaagatacccagtaaataaatccaggcttcaacggcgatcaggaaaaaaaggaatatacgcgtgcgtaccttgtctaaataagaaacatggaaataatgcacgctgctgaccagtgatatcaaggtgatgattccacaggatatgattctgtccatccctaatgtcccataactgatgggttgaaaatgaataagctcctgtaaagggtgatagaagagattcattttgtcgtaatagaacgcatagccgaaaaagagccagtagggcacacagagtcctgtaagtccggcaaagaaacttttgagtgacagggatctgaaactgatcatccccaaatagaacagaggtacaaagtaaagcaactgtggaaacaacaggcttcccagtccgatgaaaaagaaagcgtggaatatacttcccgccggatagggagattcgtagctgctgaataattgggaaatagcgatcagaaaagtgagtggcgcaaaaacggcatactggaaggaatgcagaaacaggcaggccgtggacaggaatacgtaaaagctgacatgcaaggtactgcgtgtccgtatcagcgtgaaggcggtgtttatctcgatcagcagataggcagtcaaagcacagaccagcaaattgattacatcctgccattcattgcccgtgatgatccggagaagcaggcatataaggatggcaacagggaaggtgaatcttccctttgccatatctatttggaatttgtcatagcctgccatgggttgatagtccgctgattacaggtcgaatccaatatctgaacggaaatatttcttgtcgaaattgattttcttcgcattggcgaatgattgtgccaaggcttcttctttattggcaccgtaggagctgactgcaatgacacgtccgccgctagtgactacctgtccgtctttcagtgctgttcctgcatggaatacaatgctgttttcaatctcttctactccgctgatggcaaatcccttgtcataatgttccggatatccgccggataccagcatgacgcatactgccgaacgggggtctatctccaggactttttcattcagattgcctgttgccactccttcaagcagttccaccaagtcactcttgatgcgcagcatgacactttccgtttccgggtcgcccatgcgtacattgtattcaatgaccatcggttcgccttttacattaatcaggccgaagaagataaagcctttatagtcgatgccttctgctgccagtccttctactgtggggcggatgatacgttcttccactttttccatccatgctttgtcggcaaacggaacaggagatacactacccataccaccggtgttcagccctttgtcgccttcgccgatgcgtttgtagtcttttgcttcgggcagaatcttgtagttctttccatcggtcagaacgaatacggaacattctataccgctcaggaattcttcaatcactacggtggcggaagcgtcaccgaacattccgctcagcatttctttcaattctttcttggcttcttccagggtgggcagaatcagtacgccttttccggcgcaaagaccgtcggctttcagtacgtatggagcttccaatgtttccagaaaggctagtccttcttccagatttgcggcagtgatacttttgtaaccggctgtcgggatattatggcgttgcatgaagcctttggcgaactccttgctgccttccagtaccgcacccgcttttgaaggcccgataacaggaatgtttttcagcgcttcatcttttttgaaatagtcatagattcctttgactaacgggtcttcgggacctaccactaccatatctatattattctttactacaaactctctgattgctgtaaagtcatctgctttaatcgctacattctcgcctacattacttgtgccggcatttcccggggcgatatagagtttctcgattttgggactttgagcaatcttccatgccagggcgtgttcacgtccgcctgagcctaatagcaacagtttcataatcttatcttttgtttattttaagtggtcttcaaaatagcgtgtaatgcgttcatacaagtgcacacggtcgcgtccgaacatattatgaccgtcgcccggatacataaagaaatcgggttgggttccggcatcaatgcaggcacggaggaaactgatgctgtgctggggaacacaagtggggtcattggcgccaatgatcacttccaagcgtcctttcaggtttccggctctcagcttcaggttggcgttcttgtagccttcggggttggtttgcggagtatccatgtagcgttcgccgtacattacttcgtagtaagcccagtcgatgacaggaccgccggctactcctactttgaatagttcggggtaagtcagcatcaagttggtggtcatgaaaccaccgaagctccaaccatgtacgccaatgcggttattgtccacataacccaatgattttaagaaatccactccttttacctggtctttcatctcttcggttcccaattggcggaacgtacagttctcaaattccagtccccggttgtcactgccccggttgtcaacggtcagcatgacgtaacccagttgtgccatgtaaatatcccatccgcgggcgtcatagttgcggttgttgtggattagttgggcatgtggtccgccatacacgtagactacggccgggtattttttgttggggtcaaaattcaccggctttatcaggcggtagtataagtcggtcttgccgtcggctgccttgagggtaccgacagtgatttcgggcatattgtatgcttccaacggattggtggcggtcaacaggctgatagtctttccctttccggaagtgggaacgatctcgatattccggggaatggtgaaagaagtataattgtctatcacatagttgccgctaccggacagttgtacatgatgcataccgtctttattgccgatgaggcggcgtttgcctgtctttacattcacagcgtatgcgttgctctgcaaaggggaaacctctgtgctcatgatgatgacttccttggtcttttcattgaatccgaggatgttttgtactacccagttgccttgggtaagctgtctggtcttgtagctttcccggtaagaacctccggccgcggctccatgtgattccggatatacggaagtcttggtgtccatcaggtaaagatggttgtagccgtcgcgctggctctgatagataaacttcgtgtggtcccatggcagaaagacgatgggatgttggggttctacatatttagtatgctcctcttcgtaaagggggttatttttcagtggctctcctgtttccgcgtcatagcagcatagcagggcatggttctggtcacggttcagttcaatgacataaacgcttttctcgtcaggactccagctgatattggtgaaataacggtcggtagggtctccggctttcagataaactgttttttgggtctccggattgtagatgccgacagtcactttgtggctggtcattcctgccatcggatacttgtccggctccagtgtcgctatgcgggtggaggtatttacttgtggataatcggttaccatgctttcgtccatgcggtagaaagcaagcagatttcctttcggactccagaaagtacctttcgagataccaaattcctgacggtgtacactttgtccgcatacgatgcctttcggttcgtcggtgacttgttgcgttttcccgtcggcagtcgttacaaacagattgttgtcaagggtataagccaatgaacggctttccttgttccagtcctggttggcggctttaggagagagaggctgactccatattatttcctttttagttaaatcgatcagcactttattggatgtggtatttaccagcatcatcttttcagcgtatgggaaagatgcattcctgaagtggttgattttccctaattccttgtttgccaacagttcattcacttcctgcaaagtgataagtacgttttccttcccatttgccggctggatggtttttacctcttctatgtcggcgttgatgcatacatctccccaccattgcaaaccatacaggttttgtggaagcaggttataataattgtttcctcccggcatcaagtcttccagtgtgaaacttttcttgtcttgtgcccatgttacagatgaagccatgattaataaggcaatcagattgattaattttctcataactgtttattcttctgtcttttccttattgtcgtcaaatttacggggactgcttttgaaattgtcgcggccttcacgtctgtcaccaaagttgcggtgttctcctcttttgaaatcgccacgtccctcacgtttgtcatcaaaagagcgtctttctctgcgctctcctcctttgtactctccgtgttcttcacgtctgttgtcaaaactacgacgttctctgcgttctccatattctaccttttccgtgttacggcgcgggcggatttcttcccggcggggcttgaattcccgatcggcgttctcactacggaattctttgaatttgccgttgaataattggtatttgcggaattcacattccaacgaaccgttgaacagggggatttttatagaaggctttaaaccaatctggtcgaaacattcttcacggtaacttagtacccatgcatcattgccggtgaaagagtgtttcagacgttcgcctatcatttgatacaggcccagcaaatcattggttgagatacgttctccataaggagggttggtgatgatgatgcttttttctttgggttgctcaaattgctggaacggttggatttttaagataatctccttgctcagtccggctgctttcacattgtgagtggcaatttcatttgctttaggattattgtcatatccaaaaatcttatgtgtgaactcacgttcctgtgagtcgtcattgtagatgcggtcaaatagttcctgatcaaaatcgttccacttttcaaaagcgaactccttacggaatacgccgggagcgatgttacgtgctatcagggcggcttcgataggtattgttcctgaaccgcacatcgggtctatcaaatcacattcgcctttccatccggtcatcaggatcataccggctgccagtacctcattcaaaggagcttctacagcttcctggcgataaccccggcggtggagtgactcgcccgaactatccagtgacagagtgcatttattttcggctatatggatgttcagtgccacatcgggatggttgatgcgtaccgaggggcgctctcctgtcttttcacggaaatagtccacaatggcgtcttttactttgtaggctacgaacttggagtgacggaactcgttcgagaaaaccacagcgtctacggcaaaacttttatctttatccaagaagtcttcccacgcaatggccttgatagcttcgtaaacttcatcggcattcttcgcctcaaaatgtttgatgggtttcaggatgcggatggcagtacgcaggcagaagtttgccctatacatcatttctttatcgcccgtaaaggctaccatgcgtcttcctacttctatattgctggctcccagctcggtgagttcttttgccagtacttcttccagtccctggaaagtcttggcgattagctcgaattcttccttcatcttaaatgataattacgtaatttcaattgatgggacaaatttaatgattttctgtttgctaatcaattatttagagaattaatctgtttgatgaagcaaaaaagaggatgaaatcggggcgtccacgctccttgccggggtctttatttacctttgattataaaaattctttgaaaacggaattgggtatatctgtggaataaattgacaaaatatgtatccggcaatgtaattgttatcctatagaaataaattctacacaggaatttgccatttttgctgaatcaagaaacttaaatagaaatcagaatgaaaatggaattgacggatgagaaacgtaagggatatgtggtttgtgctttaatgatactggtctcttgtttgtatttggtttatttggggtacagtctctaccgtatggggcatgcttaggacaaaatgaaaccatatctgtatcacacaggtatggtttctgtaagagaaattctatgattaataggttgagtgacttttatgcgaattcttctgccagatagacttcgtttatttcgcagaaaaactcatcggcgatatctgacagggtttccaatgcttcttcggcagtttcgccgtaagtgcagcattggtggtagtctgttaaaaaggcgtaatattccccgtagggtgtacattctatctgatattcattgcttttaagttccatatatacctccttttttatcgtactgcaaatatcttgtttatctgttacaagaaggtgtacaggaagttactgttttattaaaaagtttgctgccatactactttttagaccattttgtgatgtcagcatttctatgatggcaaaggggttttattcgtctttgttttttcgctgtacgatacgtgatccggcaggtacattttctgttacccaaatattacctcctacggtagcacccttgccaatagtaacacgccctaaaatggttgcattggaatatacaatgacatcgtcttctaaaataggatggcgtggaatgcctttaatgggatttccattattgtctagcggaaagcttttagctcctaatgttaccccttgatagagtttcacattatttccgatgatgctggtcgctccgattactacacctgtaccgtggtcgatagtgaaatggtgtcctatttgtgcccccggatgaatatcgataccggtttccgaatgtgccatttctgtaatgaagcgggggattaaaggtacacccagtattaacagctcatgtgcgatgcggtaattgctgatagcgcggatagccggatagcaactgatgatttcaccaaagcatgtggcggcgggatcaccataatatgcggcttctacatcggtagccagaatgcggcggagttcgggcagtttactgatgaaacgagctgccagcaaagaggctgtttctctgcacggttcattgtcatcggttgcatttttactgttttcctgtccgaagcaaagtcctgccagaatttgttcggtcagcagaccgaacagggtttctacatttacaccgatatggtagttgatggtatggctgttaacggtggaattaccaaagtagccggggaagataatggcgcgtgccaattctactatcttgtatagggatttggcagatggtaaaggatctccatctttgtgttggtggaataatcctttataggactggctttcagataattcatctactgcctgcgttaatatgttcgtgtaattgaatgtagtcatgaactgaatgctttagaaggacaaaagtaagtaaattctatattattgccaataaatagaatgaatattgatgttaatcctttatttttgcagaaaaaagggaatatttatggtaaataagaaaaatccatttgcttttaaggcaaaacaggaaactaaaaagaagtccggtggtaaacggatcggcaaatcgaagccggataaagcgaataatcagttgaatagaagagtgaagtaaatgaaactattgtcttgttgtaggggaagaaccagtctgcccctacaacaggatgttaatctttatttctcgaccaaagcgaaatcaagttgctttttctccagattggcgcgggccactttaatggtaaccggatctcccaaactgaattttttgtgatgccggcgtcccgtcagacaatagttcttttcatcgaaatcataatagtcatcaccaaggtcacgcatgggaatcataccttcgcacttgttttcgttcagttccacataaagtccccattcggtaactccggaaatgactccatcgaactccatgcccaaacgttcacccataaactctacttgtttgtattttacagaggcacgttccgcattggcggcgatttgttccatttcagagctatggtcacacaattcttcgtatttcgcttcctgtaccgtacgtcctcctgccagatagcgggtgagcagacgatgaaccatcatatccggaaaacggcggataggtgaggtaaagtgagtataatagtcaaatgccagaccatagtggccaatattatgtgtggaataacgggccttttgcatggcacgcaaggatacggtttccaccagattttgttctttcttgttctttatgtcgtccagtaaacgattgatggatttggatatctcagttttgctacccgatgtacgtatcttatatccgaagcgattgataaaccaattcaagttctccagtttatcggggtccggaaggtcgtggatacgataagggaatactttggctttcttgtttttaggtactttaccgattttttcggcaaccgtgcggttggccaacaacataaattcctctatcaacttattggcctctttggattctttgaagtagacactgagcggtttgccggtttcgtctatctcaaatttcacttctacgcggtcaaagtcaatagcaccggcaaccaatctttgtttacgcaggatttgtgccagtttgttcagttccagaatttcttctttgtagtcgccttcacccgtttcaatcactttttgcgcctcctcataggtgaaacggcggtcgctctttataatggtgtgcacgatgcgcgagtctttcacctctcccttttcattcatattgaaaatgacggagaatgccagtttctcttcgtcggggcggagggaacagatgaagttgcacagccgttcgggcaacatggggatggtacggtctaccagataaacggaagtagcgcgtttttcagcttctttgtcgataacgcctccttcttttacataatgagtaacatcggcaatgtgtacgcctacttcccatagtcccggtttgatgagacggatggagagcgcgtcatcaaagtcctttgcatctttagggtcaatggtgaaagttgttacattgcggaaatcttcacgttctgcatagtccgcctcggaaatctctgccggaatcttttcggcagcggtttctacattcttgggatatacgtaaggtaagccgaattcggccagaatggcatgcatttcagttgtgttttctcctgcttttcccaaaatatcaatgacttgtcctatcgggttttttgcctcttcgggccattctacaattttcacgactgctttgtccccattctttccacctttcagcttatctttcgggataaaaatatcatttgccagagtgcggttctcggtcagcagaaaggcgtagaatttctctactttcagtgtgccgacaaaagtatcgttggcacgttccagaatctctatcacttcaccttccgggttccggttcttacgtttggcaaagagggctatttttactttgtcattattcatggcatgtgccgaattacgttcggctatgaaaatggtttctccaccatcatcggggatgaaggagttcttgccgttgcttttacgctgaaagacgccagtcataatcaggccgtggtcgttcagcttgtagtgtcctttttctacttcttgcagaaaatcatcctcaatcatttcagtaatgatgtcggcacaaagcattttaagaggatgtgtagtaaggttcagactgcttgataattgtttcagactgaatgtttcgttcggttttgtgtggaataagcttatcagtcgttcagacatttcgctttttttcatgcgtttccctgcttttttttctttctttttagccataaggggatatatttatgtattatgtgctacaaagtaaacaaaataattggaatagcggttcaatagatacattaaatttggttgaatctaaatgaaacgtgctatctttgtccgttctaaaacaattgttatgactgaacttgataagaaaatcagggaaaaagaaatttatagagttacattagtggggagtttcgttaatttcttgctggttatttttaaattccttgccggaattgcagggcatagtgctgctatgttggcagatgcagttcattctctatctgacttcattacggacgtagtagtgattctttttgtacgtatatccaataaaccagtggacaagagccatgattatggtcatgggaaatatgaaacattggctactgctttcattggtatggcattattgggggtaggatttggaatattgtggaatggagcaacagatatattggttttcctacgaggtggggaacttcgtcaaccgggaatgttggcattggctgctgccattatttctattctgttgaaggaaatactttatcaatatacagtcagagtggggaaaagatgccactcacaggctgttgtggcgaatgcgtggcatcataggagtgatgcattatcatccattggtacggctgccggtattggcggagcgattttacttggtcctcattgggcggtactcgatcctattgccgctgtgacagtcagtttctttattatgcgggtttccatcaggctgctggttccttgcctggatgaattgctggaaaagtctttgccggatagtgtggaacgtgagatagaagggattgtgttatcttttggtggagtcagcgaaccgcatcatttacgcacgcggcgcatcggaaacaattatgctatagagattcatatacgcatggatgggaacatttctctgcataaagcgcacgagacggcaactggtattgaacatagattgaaagaaaagtttggagaggatactcatgtgggtattcatgtggaaccggtgaaataacatacgaagaatgaataacgaagaatttgcacaaaagaacacttgctgcttaaagaaagtattggtaaccggagcaagcggatttattggcagtttcctggtggaaggaggattggagagagagatgcaggtatgggctggtgtacgtaaaagcagtagtcgtacctatttgaaagatcctcgcattcaatttgccgaattggattttgctcatcccggaagattgacggagcaattggctgttcataaacaattgcatgggggatgggattatatcattcattgtgccggtgtaactaaatgccgccataaggacgaatttgacaaaggcaattatgtctatacccgtaattttgtagaagctttgagaaccttggacatggttccccggcaatttgtctatatcagttcacttagtattttcggtcctattcatgaagataattatgcacccatcagtgagcgtgatacggcaatgcccaatacggcatatggggtcagtaagctaaagtcggaacattacctgcaatcattgaatgattttccgacagtgattttccgtcctactggagtttatggtcctcgtgaacgcgattattttctgatggcgaagtctatcaagcagcatatagactttgctcctggttttaaaagacaggatcttacttttatttatgtgagggatttggtacaagctgtttatttggcaatagaacatggagtgcggcagcgcgcctattttgttagtgacggaaatgtctattccagccgtactttttctgatttgatacaaaaagaacttggtaatccgtgggttatacacattaaatgcccattatttattttaaaagttgtatctttgctcgctgaattttcagcgcgttgcctgggaaaggtaagtacgctgaatgctgacaaatataaaataatgaaacaacgtaattggcaatgcgatatttcacccttggtggaagaactgggatatcgtcctgagtaccctttagacaagggagtaaaggaaatcattgcatggtataagaaagaaggatggctttaaatttattcaaacgggtagacagtgtgaaaggattgtttgccgttgagagcattagtctgatatataatgccctcacgaccataatggttttaatattatttcctcgtatggaccaccctgtaattatgcttttggagcgtgcaggcattgtggccattacgtttgcattaatatatttgtatcgcaagtatccgtgtaaacttacggcatttatacgaatggctgtgcagatggcatttttagcgtattggtatcccgatacctttgaatttaatcgtctttttcccaatctggataacttcttcgcttcggcggagcagtttttgttccgttgccagccttcggtagaatttagtgaacattttccttccatgtggttcagtgaaccatttaatatggggtatttcgcttattatccaatgattgggattgtgactatttattatttcttgtttcgttttgagtggtttgaaaaggtttcttttgtgctggtcacttcgttttttatctattatcttatttatatattggttccggttgccggtccgcaattctatttccctgctatcggaatggacaatgtgatggcgcagcatttccctgctatcggtgattatttcaataataatgatattctgctgcccggtcccggttttgatcatggtttcttctttaatttggtagaggcctcacaggaagtgggggaacgccctactgctgcttttcctagttcgcatgtcggtatatctaccattgtgatgattatggcctatcgcgttaataagaaactatgttatttcttggcaccgttctacgtacttctatgctgtgctacggtctatattcaggcgcattatttggtggatgttattgccggctggatttcggcggtatgtatttatattgtggctacttatatgtataagcgttggtttgcttctgtagtcttccaacttgtgctgaaatagttttaaaaagtatataaaagcgtacagggtgtccattttcggacaccctgttttgtttataccttgttgattttcagtgataaatgttgctggcatgaatattgctttaaaaataatggctaaacgttgcaacgtttggcatagaaataacgtctaatgaataaaacaaaaatagtatgagaaaattagtatcaactttaatggcggtgacccttatgttagtgtctgccacagcatgtgcagagagaataactcctagtaagaactatgttaccaaaaaagtgaatgtgggtagttttaatgctatctctaccagttcttcggtggatgtaatctatactcaaagttccggtgggcaggatgtggaaatatatgctccggacaatttggtgaactatattgatgtccgtgtagagggtggagtacttaaggttggttttaaatcaccaagaaacaatttttcaataaacggaaaacataaaaaggaagtaagagtttctgctccggctgtgaacagcttgaaagcttccagttccggtgatattattataaagaatggactgaaaacgagtgggaaagttactgttaaggctagcagtagcggtgatgtaacaggaagcactatttcttgtgatgattttgcggctaccgctaatagttcgggtgatgtgattctggaaaaggtatcttgtacgaatttctctgctgatgccagtagttcgggtgatgtatctatcaagaatctgaacgctgctgatgtatctgctgatgccagctcttccggagatgtgattttggcaggtatttgtgagaacgcttcttacagagccagtagtagtggggatgtaaaggcaaaaggtatgaaggcggtcaatgtaactgccagtgccagttcctctggtgatgtggaatgttatgtgaccggttcgctgactgcgaaagcatccagtagtggtgaggtggcttataaaggtaatcctaaagatattgatttctctcccaaaagaggtttgcgtaaaatggaatagataatgtgttaatgctacaatatattaatgtgccaattggctgtgctgtattccgcatggcaattggcacattagcatattagcacattgtagcattaagaattcattccgtaattccccctgatataatccaagatactgaaaagttctttcacggtttcggcacggagcatggcgatacgtgtctctttaaagttggggatgcctttaaataagggagaagcagccagatggcggcgtacatgaagaataccgcggcgttcgtcaagcagattcacactgtccaacacttcctgacggagtacattcagccgccactcaaaagaaagggcagggagttccttaccggtttctatataatgttttacttccttgaatatccacgggcgtccaaagctggctcggccaatcataatagcgtctactccatactggtcaaaacactctttggcacgttgtggcgtagttatatccccgtttccaatgataggtatatgcatacgaggattcttttttacttcacctattaaactccagtccgcttcaccagtgtacatttgtgcacgggtgcgtccatgaatggtcagtgcttcaatgccgcaatcttgtaattgttctgccaaatctactataattttatgctcattgtcccagcctagacgtgtttttacagtaacgggaatttttacagtgtccacaacagcacgggtaatttccaacatcagcgggatattttgcagcatacctgcaccggctcctttaccggcaacgcgttttacaggacagccaaaattaatatccaggatgtcaggatgcgcctcttccactattttcgccgcttctaccattgtttccgtgtctctgccgtaaatctgtatggctacggggcgttcctcatcgttgatattcagcttctgcatcgttttacctaccgagcgtatcaatgcatctgccgatacaaattcggtatataccatatcagcaccgaacttcttgcacatcaggcgaaaagcggggtctgttacatcttccatcggagccaggaaaatagggtatctgcccaggtctatatttctaatcttcattgttgtatgtttatctttgggttacagaaaagtcagattcatttgagtattaatttataatctgtgtgaatctgtgtaatctgtggtgaaatcaggctgcaaaaatacggaaaaaagcctacctttgcacatatattaatcaaaagaataatgaaagcttctataaaagactttgaaataatggctcctgtaggttcacgtgagtcgctggcggcagccatacaggcaggtgcggattctatttacttcggaattgagagtctgaatatgcgtgcacgttctgccagtacatttactgtcaatgatttacgcgagatagcacagatctgtgataaacatggaatcaagagctatcttacgatcaataccattatttatgatgaagatattgctttgatgcgtaccattgtcgatgcggctaaggaggcaggcatcagtgccgtgattgctgcggatgtggcggtaatggcttattgttgcgaggtggggcaggaagtacacctttccacccaattaaatatcagtaatgccggagcgttgaaattttatgctcgctttgccgatgtagtggtattggcacgtgaattgaatttgaagcaggtgcgggtgatttatgatactatccagaaggaacaaattaaaggtccgaatggagaattggtccgtattgagatgttctgccacggggcactctgtatggcagtgtcgggcaagtgttatctcagtttgcatgagatgaatgcttctgctaaccggggggcttgtatgcagatatgtcgccgtgcatacgatgtgaaggataaagagagtgatattgaactggaggtggacaataaatacatcatgtctcctaaagatttgaaaactattcattttatggatgagatgatagaggctggcgtgcgtgtcttcaagatcgaagggcgtgcccgaggacctgagtatgtacgtaccgtggtggaatgttacaaagaagctatttgttcttatctggagggcacttttaccgaggagaagaagcaggcttgggatgaacggctgaagaccgtattcaatcggggattctggaatgggtattatttaggacagcgtttgggtgaatggagtaagaactatggttcggaggctactgagcgtaaggtgtatgtgggtaagggaatcaagtacttttctaatattggcgttgcagagtttctggtggaagctgctgagatgaaagtaggggataagcttctgatcacaggacctactacaggagcggtatttctgacgttggatgaggcgcgtgtggatttgaaaccggtggatgtggtaagaaaaggtcaacatgtatcctttaaagtacccgataaggtacgtcctagtgacaagctttataagttggtttctcctgaggatttgaagaagaaataaaacagaaagaatgtgtttctaaagagatattgaaatttaaatctcttatgattaaaatccgaagagaagctcccttttcttattttatgtagcaatgaataaagtaagaaagggtagggtatcatgatgatacagattattataaagctgtttcattaatctattttgagttatcctttggaactataaatttattaatgaatactctcttttgatttgtttgagaacaataaaaaacccgtaacagttcattttgctacgggtttttactttgttagagtttgctgttatttggtataaattgagagtttaggatgatccttgtaaaggtttttgttcgccagctcttccgaatccgtaattcggtacaaataatatttactgtttggacagaatgcacttttatcggggaaattgaagaaacgatgtccttgagtctttttcttcagggtgtgagtttgtccgttttcatcagtgtaaatatagtcaatgggaccttcgggatatgctttgcggactacggtctgttggttacggataatgtctatcaaactgaatccttccccccataattctttgcggcgttctagccaaatagtttccaatagatcctgttgtgaaagatttgtatgaatggtttttgcccctctggctgtttttaaatcatttaatttgttaattgcatctggatcattcagatgtgcttttgcttctgcatttatcaaataaatttcggcaacgcgcatcaatacgatatcaccaagttggttttcgatatcgcggaatctgaatttagagttacgcatccatacataggctgctgatgcgacgtcagctcccggatctgtggcccagaacagcatttctttacgataatcaccatcttcgaacaaatcacggaagtaagggtctacattgaagctataatagtatgatcctttagttgtagtatctaaataatggaattgataactggcattactttgatcgttggtttgggcatgcccccaaatccattctttattgtctacagaattgaatccggctttatattcactttcggtcattaaataattgtttttagttaacaatttgtccgagtaagttttagctttctcccattgacgagcataaagacaggcacgtgagagaatacctaggacaacttcattgtcaattttgtgtttggcgtcacgtacataagtttcgggaataagttctaatgcttcttctaaatcgttgatggattgcgcatatacttcactgacacttgatgcgggttttccttctgctgcaattgtttcatcggtggactgtgtatagacaggtgcacatacagcgtccgggtctttatcaatagcaaaggaataacaagaggccaggtgcaggtataagaaaccgcgtaaagccaatgcttgtcctttaattcggtttctgtcggcttgcgtgccttcggcagcatcaatattgtctaatacgccattgcagtcgttgattacacggtatgctaaaagccagctcaaggtgtttgtgcctccttttccataaattgcagaaaactcattatgtgtcctaaagccatatttgctatttaacactacatcagaacccattgcgtcatttgcacgtagcattgctccatagccggggttggcgtaagaattgaaagtttccatcaggtagttccagccaccattaagtactttttcggcatctcctgttttaccgaaaacagaaccggcatctacataagtcgtaggaattgtatccaaatcgcaggaagtgagcattgtacttcccagtgcgaatgaaaatatatattttaaaatagttttcatattcttctttctgtattaaagtttcacattgataccgaatgaaatagttttcattgccggataacgatagtaagtagagcctccgaaagtttgctctgggtctagaccttgttgtttggctaatgtcagcatattttctgcttgaaaaaatatgcttgcatctttcagcgtcaatgtattcagcaatgacttcggcagattgtaagagaatgtaatattcttcaaacgtaagtatgaacggtcaactaagaaccggtttgaagagtttgtccatgaacttttgggagaagtagtcagacgcggtacatcggtatagggattttcaggagtccaacgatctaacatatctacgctccaaccggtgcctgtaggtccttggctcatcaatgaaactttatccccattatagattttaccaccaatggaataagagaataaaaatgataatgtaaaatccttgaatgagagatctgattgaagaccgccggtccaatctggtagtgaattgccgcattttactttgtcgtccggggtggttgatgaatagtcttctgtggttatcttttctccgttggtattgtaacgataccacgtaggattaccattttcaggattgacaccagcccattctactaaatagaagtcatataacgatcctcctttcacccatttcttgttgccactccacatttcttcggcaggcaatgaggttattttgtttttataggtagtagcattaaaagaaagtttccatttccaatctttagtcatgataggatatcctgagatttggaattcccatccataattcttgatagcaccaatattttcgtccatacttgagaagcctgaagatggcactaagtctttagagaataataaatctttggaacgacgttcaaaatattctattgtaccatttagacgattgttccagaaaccaaaatccaagccgatattagtatttagattggtttcccatgataaattaggagttgccagacgataagcgtgcaaaccggattcaccgaggttattgcgtatggaatagagcgcctgatacgcataataacctacctggtcattaccttgtgctccgtagctggcacgcaatgacaaattggatagccagtctgatgtgtccttcataaactcttcctgcatgattttccaagatgcgccgactgaccagaaagtaccccaacgatgatccggatggaaacgggaagaaccgtcagaacggacagaagccgataagaagtatttttgattgtacgagtattcagcacttccaaagaaacttaacagcttgtattggtcactgtttccgccaaaatcacctaaagaggaagctgcgtcgggctcataaaatccatccatgatgactttgctgcggcttccgccgaaattggaagtgttatattcataatactcctgaccggccatcacacggatatcatgtacatcattgaacgtgtgttgataattaatgacattattaaaagtcatgcctgtagtgcggtagttgtatttgcttacgctgccaccactgatagaacctgtaccgtaagtaggattggtgtagttatgatttgttttgttgttatagtcaatgttcaaagacatcttgtaagcaagccctttgatcggagttatttggataaaaccacgtaaagaggcagcatcacgttttatctcacttttatcgtgtggcatggaagccagcagattatattttgcatacgagttcgggcgatactcaccataatcgaacatacgttcattgttttcgtccaacaggtatgctccggttgccaaatcgcgttgatataccggatagaaagatggtaccgaacgggcaaacatgaccacattggaaatggtagagtcatcttgcttgggatagtcttgaacagaatgagttcctgatacgttcaatccgatctgtaaccatttgcggatatctgaagtcacgttggcgcgaagagtatagcgtttgaaaccagagcagatataagcaccttggtcatccatgtaacctgctgaaacaaagtacttggaggttttgctaccaccacttacgcgtacatttaaatctgtatagtgcgcatcttgtgaaagggcgtcgtcccagctgtcgtcccataatggtttggcgcctgctaccagttttccgtcatggccgattggttcaggataagcactgccataaggattgatgcctagattgcctgtaacattgcttgatgcccatacagcagcttcttcggcagagtaaccgttgtccatacgatagttacgcatggcttcccaatataattcataatattggtttgtattcaactggtcgtagtctgcccgtgcacggcttgaaaaaccatatttggcagataattcaacggtgggtgcgctatctttatttccttgtttggtggtgatcataattacgccgtttgctgcacgtgagccatacaatgcagcggaagctgcatctttcaatacagtgattgacgcaatatctgaagatgctatggaggaaagagcaccatcgtaaggaacaccatcaaccacatagaggggattggttgaagcgtttacagaaccaactccacgaatcaggatcgttgcgtctgatccgggttgaccgctggaggaaaaagactgtaagccagctacagttccttgcagtgcttttgatacactactgacctgtgctttttcaatagtaccggcggcaatatagcttgcagaccctgtaaatgtggattttttggcagtaccgtaaggaacggttatcactacctcatctaccatttgggctgcttcctttaattctacgttaatcactttgcgtctgtttaccggtatggttactgtttcataacctacaaaagagaagatcaggctttcgttaccattaacctgaatctgatagctgccatcaatggaagtgatggtaccgcgagtttgtccttttacagctactgtgacaccaggcatctcttcgcctcctgcggtgactttaccagttactgtaatttcctgtgcatatgtaatcatgcagaatagcaagctacataataatgaagaaaatctgttcatataaacttggcttttattaggggtttgtacattgccatttttcaggcattatatattgaactctctttctaaaattgtgatgctaccttttttatcattatcatatttcctaatagtggttttatggccatccaaacctcattagggtctctttttgcttgtgtattttataattgtgatattcaataacaatcgcaaatatatgtattttgatttaaataggataatatattttaatatttttttcatggtgaacctgttgaaagtcaaaactatacggaattttattaacgtagttaaaataggaattgtcttatttaaatattgggcggatagatcaaatctatttgtttatcgcattcctgtgtattgatttgtttaatttgatttcaacagtaaatctacttgaatatcaaaatgaataaaaatattttttagacatattttattgcttgttgtatgtttattcgtttgtgggctattcgtttttcagtcggaaaagtatcgtttgcagagaggagatatagtaaattaaggtaagataggaaggatttcgcctaaaatgtctatctttgcaatccaataacaaataagtgtacgtacatattatgaatatagaagaaaaactcaccacgtccattatcagcgctatcaaaacgttgtacggacaggatgtacccggaaaaatggtacaactgcaaaagactaagaaagagtttgaaggacatcttactttggttgttttcccttttctgaaaatgtctaagaaggggcctgaacagaccgcacaggaaataggcggatacctgaaagagcatgctcccgaattggtttcagcctacaatgcagtgaagggctttcttaatttgacaattgcttcggattgttggattgaacttttgaattctattcaggctgctcccgaatacggtattgaaaaggctacggaaaactctccgttggtgatgattgagtattcttctcccaatacaaacaagccgcttcatctgggtcacgtccgtaacaacctgttgggaaatgccttggcaaatgtcatggcggcaaatggcaataaggtggtcaagaccaatattgtgaatgaccgtggtatccatatctgtaagtccatgctggcctggttgaaatatggtaacggtgaaacacctgaatcatcgggtaagaagggggaccatttgattggtgactattatgtagcttttgacaagcattacaaggctgaggtaaaggaactgacagctcagtaccaggctgaaggcttgaatgaagaagaagctaaggctaaggcagaggcaaactctcctctgatgctggaagctcgcgagatgctccgtaagtgggaggcgaatgaccctgagatccgtgccttgtggaagaagatgaatgactgggtatatgccggattcgatgaaacgtataagatgatgggagttagtttcgataaaatttattatgaatcgaatacctatctggaaggtaaggagaaagtgatggaaggactggaaaaaggtttcttctaccggaaagaggataactctgtatgggctgatttgactgccgaaggactggaccataagttgcttcttcgcggtgacggtacttctgtttatatgacccaggatatcggtactgccaaattacgttttcaggattaccccatcaacaagatgatttatgtagtgggtaatgaacaaaactatcatttccaggtactttctatcttgctcgacaaattgggttttgaatggggcaaaggattggttcatttctcatacggtatggtagagctgcccgagggcaaaatgaaaagtcgtgaaggtacagtagtggatgcggatgatttgatggaagcaatgattgaaactgctaaggaaacttctgctgaattaggtaaattggacggtctgacccaagaagaagccgacaatattgcccgtattgttggtttgggtgctttgaaatattttatcctgaaggtggacgcacgtaagaatatgactttcaacccgaaagaatcgatagatttcaatggcaatacaggacctttcattcagtatacgtatgcccgtatccagtctgtattacgcaaagcggctgaagcaggtatcgttattcccgaaatcattccagcaggtttggaactgagcgcaaaagaagaaggtttgattcagatgctggctgattttaaatcggttgtcaagcaggcaggctcagactataatccttccattatagcaaactatgcatacgatttggtgaaagaatacaaccagttctatcatgatttcagtattctgcgtgaagaaaacgaagcgttgaaagtcttccgtctggcattgagtgccaatgtgggcaagattgtgaagacagcaatgggcttgctgggtattgaagtgcctgaacgtatgtaaatggcaaagaaacagaaatattatgtagtatggaaaggtgtcaatccgggagtttatgactcctggactgactgccagctacagataaaaggttatgatggcgcacaatacaagtcattcgagaccaaagaggaggcggaacacgccttggcttcttccgcttttcattatataggcaagaatgctgttaaaaaagaagatactcctaaacaacttcccgagaactttgatatgaactgcctggctgtggatgccgcttgcagtggaaatcccggaccgatggaatatcggggcgtttatttgcttacgggacaggaggtttttcatttcggtcctgtttatggaacgaataatattggagagtttcttgccattgtccatgccttggcattgatgaagcagaagaatatcagtatgcctgtttactcggacagccgtaatgcgttgagctgggtgaaacagaagaaatgtaaaactaaactagagcggactcctcagacggagaaactttttcaaatgatagaacgagccgaaatttggctgaaagaaaataaatataccacacctttattgaagtgggaaaccgaccgatggggagaggtcccggctgatttcggacggaaataataaagaactgaagatatgaaaaagaggattgcttatatcagcttgtacttttttacggtcttactgatatttattctacagaaaccattattcatgctctataatggttccattgaaaaaggattcgggtttgccgattatatgcaggtaatgattcatggcgccagtcttgatgccgctacggcgggatatcttactgcatttccattcttgttggtactgataagtatttggtttaggaaattccctttgaaaaaaatactttacgggtattatattttggctgccgcgcttatttctatcatttttgtggtagatatggcattatacacattctggggatttaaactggacgcatctgtttttctttatatcgattcaccgaaggaagctttggcgagtgtttccgtcggatttatcttgctgagggttcttgccatcttgttactcatagccctgaatagttgggtcttgctgaaaatcacgccttccgttttgaccgccacccggaaacggatagcgggaactgcgggaatgctgttattaggaggtgtgcttttcatcattatacgtggtggtgtaacggaatccacttctaatatagggcaagtatatttcagcaacgaacctttcttgaatcattcggcggtcaatcccgatttcagtttgttgtcttctatgggtaaatcccaggattttgcatcagagttcaatttctttgatgaagagaagcgggctgcattgtttgacggactttatcctacaacagatggggatagtattattcaagtcctgaataccaagcgtcccaatattcttattattttgatggaaggttttggaggtgcttttgtagaacctttaggcggtcttcctgatgtgacaccccattttaaccgtctgtcaaaggaagggatcttttttacaaactgttatgccaatagtttccgtaccgaccgtggaacagtctgtactttcagcggttaccttggattgcctacggcatcggtaatgaaaattcctgccaagagccgtacgctgcctgctatagctgaaggattgtccaaggcgggttataaaacagatttcctgtatggaggtgatatcaactttaccaatatgaagagttatctgctgagtaccggttatcagcgtcttacagccaatacagatttctcattggccgaacagaccagtaatgcctggggagtgaatgatgatattacttttgaatatttatataatcagttaagaaaccggaaggaagaagggccttggcatactgcgtttctgacacttagcagtcatgaacctttcgaagttccttatcaccggctggaagataaaattcccaatgcctttgcttatacagatgaatgtctgggtaagtttgttgaccggttgaagcagactcccgcatggaaagatcttttagttatctgccttcccgatcatggtttctattacccgcgtgaggggtctaatgcgatgcctcgtttttatcatattcccttgttatggttaggtggagcggtaaaacagcctatgcaggtggacaagattatgaatcagaccgatttggcagccactttgttggggcagcttgggttggaacatactgcatttacgtttagccgtaatgtattgggaagtgattataagtatccttttgccttttatagtttcaataatgggttctcattcagagacagtacaggggtgacggtgtttgataataattccggcagtattctttttgatgagcctgaagctgacgaatcccgtctggataagggtaaggcgatattgcaaaccgtttatgatgatttagggaacagatagtaaaacttggacgcggactatatgaatcagtatggaattcatatagtccgcgtctcaatcggtgcagaatctgccggatataactatttccgtttctcgttgaacttgtacatgattaccgtattgcgtaagtcgcaacttctgtaatctgtatggaagacctcttccagctgatactttgcattgtaattctttaaaaactcctcttgtgcatttgcagaaagtatgacatacccttcttgcggattttccagtgtgaaattccgcatttggttattcatataataatttgtacaataaaaccgtatcattctgtctgtatatgaataaacgactccttcaggcacctgttttctgatatcctctgccagatgcttatcggattttacagctagtattgttggctgatataccccgtctaaagcgacaaacaggcaaagaacacaaccggtgattccatagaggagtgaccccgtactactttttttgataaccagccttaatgtacagatggcagccactaccggcaatactataatcagccatttggaaatagaaaaggacgtgctttccaaagcttgcataaacgctatgttttcggcagcatgacgtccgttgccccatatgctgtccggtatcatctgacagcgtacagcaaaaaacaccgcggtgagtaacaaacagagcgaggcaaagatataagccgatattttgaacactttcgcccctttttgcattaacgcctccagatactgggcaatcagtacagccataaatggatagataggcaacaaatagacgctgcgtttgcttttaggaatacaatagaagacaaaaatagcgataatcactatccagataaacagctgtatgggggattgtgagcggatgttatcccaaaccttcctgatgcgtccggtgaaagagtttcctgcgggcagcaggtgcatttcattccatttcagtccgaatagtgagataagcaagaccaatgtccaaggtgtccacccccatataatggtcaggaagttataccataaagggttgtgatgcgacgggtatgacattttgccgacaaagcgtccggtgttttcctccagcatcaggtccataaacggctgtcctccctgtagccaggccgcataaaaccagattcccaatggaataagggaaagcagcccgattccgaataaggaaaggaaagtcttgccgaatgagcgtccccgtatcagctggtaaataccgatacacatacaggggaatatagaacccacaggtcctttggtcagcgtgccgcatgccatcagcacgacagccgtccaaggtattcccttgcagcctttttcgtcccagcgaaatagtaagcaaagtgagatgacgatgaaggaaacctgtagcatatccagcctgcaagccaccgccgcccggtgcacttcgaatgaagtgagcagtaaaagggaggtaatgactgctgtctttgtatccttatagcgggctacgaatccgaaaaacacgaactgcatagctagaaaagcgatagcggacggcagacgggacgagaattcgctcacccctccgaaaatggcggaaatagctgcaatagaccaatacaggaaaggaggtttataggcgatgtctgttccgtagttcaaaggcaatatccagttgccgctttccaacatcgagtatgccacaattgcttcgcgcggttcccctttagagtaaaaaatagtttctcccaaaaaggggattattacaagtgtgcttagtaaggctatgaaccaaaatgcttttttcttgtctgacatatatttttcggtcttttatatttactgtcgcaaaagtacgaataattctttagtaatacctaactttgcattttaaatcaatgaaaatgaataaactgaaacagatacccgagttcctgcgatttgtaatggtaggcctttttgctacagggctgcactatggcatttattttgtcttgcaaaaattcattcaggtcaatgtagcctataccttgggatatgtgctgagttttgttgccaacttttatcttacggcttattttactttcgggcagcctccttcctggaagaaagcttttggcttcgggggggcacatctgacaaattatctgatacatatcggattgttgaatctctttctgcggttgggtttttcccgtccgttggctcccatcccagtgtttctcattgccattccggtaaattttttattagtgaggtttgttttcaaacaaaagtaatatctttgaggagtctttatgatagtgaagaatgatatgaagaaagtgactcttttgattccggtatataatgaggaagcgatgctgcccactctgtatcaacgtttgatagagcttgtcaaccgcaatgccgtttatgagtgggaaatcctgtttgtcaatgatggcagcagcgacactacgctggaatgcctccgccggctgaggcagcaggacaagcgggtgaattatgtcaacctttcgcgtaactttggtaaagaggtagccatgctggcgggttttgattacgccaccggcgattgctgcgttgtgatggatgctgatttgcaggaccctccggaactggtagaccagatgctggaatattgggaagaaggatatgatgacatttatgccaaacggcgtacccgtggcgaggaaagctggttgcgtcgtcagttctctctggctttttatggtatacttcagcggatgagccgtattgatattttgcccaatgtgggcgatttcagacttctggaccgtcgttgtgtgctcacgttgcgtcgtctgcgcgaatgcgagcgttatacaaaaggattgttttgctggataggctatcagaagaaaagcattgaatttgatcgcggagacaggctgatgggccattcctcctggaactttctcaagctgttgaatctggctgtcgaagggataacctctttctctatcgcccctttgcgtattgccacggtatgcggagtgctctgttcaatctccagttttatttatgccatttattttctgataaagaccgtgctttatggtgatgaaacggccggcttccccactttgatcattgtcatgctctttttaggtggcatccagcttttctctttgggaattataggagagtacgtggggcgcattttcaaggagaccaaaggccgtcctacctacatagcctctgattataacgaggagaagttggggtatgaccgttaaggaaggcaagacggtgaaacccgtcccaccttattgtccgttagctttattgacagtcttgtgctcttttaccagatactccgcactctgcaatgtggagaaacagtattttttcatcacgtagaatgtactgtcctcccctgttacaagttgcaaggcatttccttgcttcttatatttgaattcctgccggtcatgtggagaataaatatataggtgggttgtatctgtagccgctatcaaattatcggcggagaaatagacatacgggcgttgttctgttaacaaatttatgccgaagtcgttttgggtataactcatgttcagcagtccgagtaaagtcggtgccacatcagtctggccgcctggctcttgtctgatttcgggcttgatgccttttccgtaaatcattagtgggacatggttgtaggattgtggtatttcacagtccggacttcctaccaatttcccatggtcacccagcaaaacaaagattgtattttcaaaccagggttgtttgcgtgcttcttgcatgaattgccggatggcccagtccgcgtattccacaatctgatcttcaagctttgtgctgtgtggtttgaaatagttaggtatcacatacgagggatggttgctgatagaaagcaatacggtaaagaaaggttgtctttcttctgctcttttgttcagaatgggcaaggcatattgatataggaaatcgtcttgtacaccaaagctgttaacgactttatcctttgggtagttttcttgtgcatatatttcatcaaatccgttagtgcggagaaaagcgttcatattatcgtattgtgattcgtgcgtcatgaagaacaggttccgatagccattatcctttaatacggtgggcaatcccgaatagacaggtaccactgctcctttcatggcattccgtttcataatggcagggaaagagtagagggtggcatacattccgtggttggtatgtatgcccgctgaataaaaatggtcaaaactgagagattccagataaaggctgtctaggaaaggagtcagttttttggtagatccgaaatgctccatcaagttggccgacattgattccatgaaaataagaacaacattcttttgtgtagggacggctgcgcatttcacttcacgtgcaatgggggagatgccttctattccttttctttgcaatatactttgcatattggttattgcctcctgttccggcatcaggtgaagatagcggttttccttacggttatcatccagtgtgctggtaagtagattaaagacaggattaacccctagctgattcaggaatggatcggtgcaatagtatgcttgacttaccctgatggggttatatcccatgcgtccccgtattccgaatagacaaagtcctatacaaacagcaccggcggcgaatatacataggcggtttatcgggctgatggaagtagatttcgaattgatgagatgatagaaataagaagataaccgtagtacacttcctgacagcagaagaatagatatcagtcctagaaaaatagggaaatagaacgatgtctcacccaataccattccggcagtagtggctccatatccgaaccaattgtaaatggaagaattgattgtcttaaaaaaataggagaaataagggatgttggctgccgaaataatgaacgacagtgaataaaatagaatgaaaaagatagagataaatctgaatacccacttggagtgatagttgcagagagcggttatccataaaatgactaatggtaacagcaatatgtagcaagctataacattgtcaaaccatagcccttttataaatgcagtggcttgcatgagaaagttgttttgtatatcgggaggaaactgataatctattgaggtgaacaggacaagccggaacaggaagaaaaaaagtaaagcaactatatgtatgattaataagtaaagtaaagaaagagtaaactgttggataagcttagcctgattcttacatgctgttacagattgctgcatgagtgaacggagatatttcatttgttttagtaaagttttcatttgtttgaatcaatccggatgattgacaacaaaggtaaacagaattttagaaatatcaaaagagggtatgccaaaagtaaaattggctgccaatttgttcactttaggggcagacatgtgagtccgcccgaaaatatgggcaagcagtttccgtttcttattctattttcgggaaggagtaaggcggtctcttttcatagtcagaacaaaaggacagaatagccgtgctatccggttgaggcgctccagacgtccgtctttccgcgttccgtttaatttctgccggaggagttcccataattgcagttttacttgctctgttgtgcttagtttggcaatgcggttgtaaagcattccccttcgtatgcaccgtttgtatctgctcaggtgggtaaggtgttgttccataatgcgtactatctcaatatcttcgctcttaccccctccgttgttttcagctttgacggtaactttctgggtatgttgtctgaagtagttcagtacttcatatctttctataatgtctccttgcattgccatataaaaccagaacagccagtcgccgctgtagcgcatttgcaggcattgttccatattttgggcatttaccatgctttttctgaaaatggccgagcttgcattggctatgtaaccacgccagtaaaggttatgttcggcataagttttcccattgaacacggcgtatggaggtatggcagatttccatttgttcatgtcgcaactcagcacattaccgtctttgtcaatatacttggaaccggcaaagcatacggcggcttgttggtatttctccattaaaggaactactttctctaaaaaagtaagctcacacaagtcatcggcttcggctatccatatatattttcctttggctaattgcatgcctttaaaccattgtttaaatggatttccggtgttgtgctcgtttaatagaatatggctcactttggcatggttttgatagtccgataatacctcttcgctaccgtctgttgaggcatcatcaagtaaaatcagttcgatattctgataggtctgttgcagaatactctgaattcgtagattgaggtatcgtttataattataattaggtaccactacactgaccaagggaagtgcattcatgctctattgttaagttagttcctttttaattttacaaatataacgttatatagttaaataaacaagttgcttctttgttttttctttcaagaaacaggaattgtgttgaacttttaaaaagaaacgataattaacattttagtatgcagtctttcttgtacctttgcattatacactacatagcatttgctgtattaaactaaaaattaaattagacattagactattgtttaaattcaattagtatgagaaagaaaattctttttattattccgtacattccttatccgctggattcgggcggtaatcaagctttctttaatatggtggagtatttgcgtcataagatgtccgtatctgtattgctttatcctgaaacggagaagcgtatgcaagatgtagagtcattgaagaaaatttgggataatgtggatttctttatttatactcctaaacctcaaactgtcagattacccagaattaaacatcctttttattataaatggctgcaaaagatacatgcgtctgtaacccgtaaaatgaaccggcaacagatatggacggatgaaacgggcgaagttgtggatttagtacggggaaagagtactttgttcagctcttgtttccagccgctagaccaggggtatgtggagtatgtttctcaggtggctcattcaggttttgatattattcaagtagagttttatgaactgttgtcattgggattcttgttgcctgaaaatgtacagactatttttgtgcatcatgaactccgctacatccgtaatgaaaaggagattgctttgttcagggaacagactgccggtgacaggatgttgtttcatatagcaaaggattttgagcgcagtgcattattgaaatataaagatgttattgttctgactgaagtagaccgtaaaattatggaggacttcataggacggaaagaccatatctacacttctccggctgtggtgcaagtgggtgacaggctggaacagccttttgttccggtccaaagcggacgcctgacttttgtgggaagtgaggatcattttcccaatctggatgccgtggcatggttctgtcacgaagtgattccgcatctgcgtaaacgtcatttttcgtttacattgcaagtaattggtaaatggcgtggagagtgtatcaatcgtttgcagtccgaatacccggaattgaagctggtaggctatgtggaagatctgggctcttttttaaaaggcagtgttgctgttgttccaatacgtatcggtagtggtatgcgtatgaaaatattagatgctgtattgtcaaaagtaccttttgtaacgacggcaaagggtgtggaaggcattgattttaaggatggtgaagattgcttgattgttgatgaccctgccggatttgcagaagctgtcatagccttgtcaagtaatcggcagttgcagagacagttggttacccatgcggaagacagtttgcggcaagtatataaccccggacagatgcaggaaagaaggcttgccgtgtatgaacaaatattaggggataaagtggggtaatcttgggtgattatttcttttttgttacctttgcggcattatatataattgataattatgctgaaacagttctttagtttgttgaagcggtatattcttccataccgcaaatatttgacatgggcattgatactgaactttctgtcgcaatggcttaatgtgttttcgttcatggcgattgtgccaattttgaacattctgttcaaaattgataccaagtcttatgagtacattcctatggatattcataatttggataaggatgtactcataaataatgcctattactttgtgagcaattttgtggcgacaaatggtgcgttctatacacttgccatgatgggaggaatacttatctttatgactatgttgaaaactgccggttattttgcttctgcggctgtcatggtacctttgcgtacaggtattgtccgggatatccgtattcaggtttataataaagtgttaagtcttcctttgagttttttctcagaagaacgtaaaggagatatcatagcccgtatgagtgcggatgttacggtggtggagaactcgttgaccagttccatcgatatgcttatccgtaatcctatcgctcttttggtttgttttgtcactctgttttcggtaagttggcaaatgacgctttttgttatctttattttacctctgacaggttggataatgggggttgtcagccggaagctgaaaagacagtcctctacagcacaggcgcaatggggagatattatgtcccaattggatgaaacattaggaggtttaagggttatcaaagcgtttatagccgaaagcaaaatgtctgcccggttctctaaaacaaacaatgacttccgcgatgcaatgaacgagatgattatccggcaaagttcagcccaccccatgagtgagtttttaggcacttgtgtgattgtgaccgtgctgttgtttggcggtgctttaatcttaaatacaaactatgctccgatggatgcggctactttcatattttatctgattatcctttatagtatcatcaatcctttgaaagaattttcaagagcattttataatattccgcagggattggccagtatggagcgaattgatatgatattgaaagcggaaaatcatatcgtagagccggagcagcctttgccattggacgctttcacagataagttagagtttaaaaatgtaagtttcagctatgtagaagggcgtccggtcttgaaccatatcaatctgactgttcctaaaggaaaaacgattgcactggtgggccagtccggttccggaaagtctactttagtggacttggtaccgcgttatcacgatgtatcggagggtgcattgctgattgacggcaagaatgtgaaagatgtatccatccacagtttacgttctctgattggtaatgtaaatcaggaagctattctgtttaatgacactttctataacaatattacttttggtgtagagaatgccactatggagcaagtaatagaagctgccaagatagcgaatgcacatgatttcattatggaaacggaaaaaggatatgacacgatgattggtgatcgtggagggcgtttgtccggtggtcagcgtcagcgtgtcagtatagcccgtgcaattttgaaaaatcctcctatccttatattagatgaggctacttcggctcttgacacagagtccgagcgtttggttcaggaagcgttggagcgtttgatgaaatcgcgtactactatcgctatcgcacatagattgagtaccattaagaatgccgatgaaatttgtgtactttatgaaggcgatatcgtagaaagaggaactcacgatgaactgatagccttaaatggatattacaagaagttgaacgatatgcagtctttgtaaagtggagcaaataaagaaattggcaattgttattcccgcctacaaggggcgtttccttaaggaaacgctcgactcaattgcagttcaggcccataaagatgagttcgtgttatatataggtgatgatgcaagtcctgaaagattggataagattgtggaatcttatcagaataaggtaaatctggtgtatcatcgctttagcgaaaatatggggggcaaagatttggtggcccattgggagaggtgtatccagctgtctgcagagccgtttatctggcttttctcggatgatgatttgatgccggctgatggtgtggaacgtgtcatggaggctttgtcgcgcccacaccatcagcgaggatatttctttcgttttccattagctgtcattgatggtgaaaacaagcggatacgtgccaatcgtcctttggaagaaggaagtgtgtcttgttaccggctgctgctagataagttacagggaaagatagattcggctgccgtagagtacgtgttcagtcgggagatatggcagtcggcaggtggttttgttcattttcctatggcttggtgttcggatgatgctacgtgggctgcttttgcccgtcatgcggggggtgttatttctttgccggggcagcctgtatgttggaggaatgttgaaggtgcaaacatcagtaactctgccggtcatgacaaagataaattgcacgctactattcttttcttgagatggatgaggaatatgttttccgattatgtggatgatccggagctgattagtgcattgcaatgctatatccataccatccttcgtatttcattgcataaacattataatatatgtggtttgtggggggtatctatggctttgggaagatttaataaaagggcggcctttactacgtttttcaggaattttaggttgttctcttaatttcatttatgcagccgcttgcgatttctcaagagtgcctgtattttcataaaaagtttgggtgcatatatgccctcacttcatatttctgtcctgtatgtatagtcagatgtatatcttcctgtcatatattgtttcacttttttaaagaaggacattggggagttttttcatccgtaaggaattgtgtggttttaaaatcagattcatccttaaaatatcttatccgcatccctaaacatttcttgctgtatggttaaagggttttttcctgtttgttctatctccgcaagcctttggagttaactccatagtcttgggagataactccaaagcttatggagataactccaaaggctatggagatagaatacatccatataaaaaggtttaatctggagatagaaaaagcttatgcaataggactgactgctatacatattcattcactcccttattattggaaaaatttatagatagagagcctgtattattgattgtcttttttttctgcaaaaatatcacaatttcgcttgcaaattcaatatttttttgtatattaccgatctaattcttataatctctgtttgagatatctttgtttatggaatgaatactaaaatagtttggcgtttaattgtttggcatttagtggaaaatgacatgatggaattataagattgttcattgtgaaaatgagaaaagtatactaactttaaatgtgataattatgaaaaaacgaattagtttattaagcctttgtttaggtttattcattgctgcttgtacagacagtagtggttttgaggatttacagaatttctcggaaaaagaggttatgccacgtgcggcaggtgacggaatttatgatgtgttaggttatggatatgatataacatcagactacttgggagaagcttctgttcgtcaaccggttttagatgtagaagcatttattagagataataagggacgttttgataatccttttattggaactatagaacaaaaagttactgctggtgaggatgcatggtcttttcttcagcaaacaataagtaatacaaatttttctggttctgtagctgcaatgggtaagtctgatacatcaaaaggatttttctccgggagtattactacaggatttaagtctgattctaaatattcatattcttccaaatattcttttgcgcgagcggaagttataaagaaacagagacaatatcttttatatactaatgctgaaaccttatcacggtatttatcttcaaattttatagcggatttaaataaatactcagctgatgagatagttagaatgtatggaactcatgtactgactaaaataacagtgggtggttcctatagggcctattataaatctgttattgtagaagaagccaatcgcacagagaaaatgaagactgtaacagctggtgctaaatataatatgaaaaaggtggggctcgatgcaaatggaagttggaatactacaactattactgaaacgaataagaaaaattctaattggacgtgtgatattaaatgtctaggaggaacaacttctggtactactataactttgtctcctaatcagggacctacgactactatcaatttaggtgcatggacacaatcagttgatgatactcattcccgtttggttgatgttgattggaatgctacttatcctatttatgatttagtttcagatcctgcaaaaaaagtagcattaaaaaatgcagtagaaaaatacattgatagttttaaactggagatattggaattgttgcctttatataattattatagctccaaacatataaatagtagttattttacagagtggaaaggaacgcattttaatacggatgattatcaaggtgtaacatgctatctctgtgcgagtcaagtggagggaactgttcctttatatgaatattatagtgcaaaatatataaatcaaagtttaagttctgtatggagaggtaatcagagtaatacagatgtataccaaagaataacaggttatatttataaatcgcaggttttaggaacagtacctttatatgaatattatagtgcaaaacatataaatcatagttattctgttcaatggaaaggacttcattttaatacggatgattttcaaaaaattgtaggatatgtatttccttttgaagattgattcatgttggagataaaaaatatcaatattctttttcttataaaatagcttctagcacaggtatgtgatatgaacaatgcttattaaaacttgatttattaactttttaaaatgtactgttatgaggaaaataaatttgtgttattttttatttgtaggagtgctggtttcttgtacaaatacttatgacgtttgtgaaatgcaaaggaatgaaacagaagatatgagttcccgtatggcaggagatggtgtctatgatgtactggggtttggatatgatataacagaggattatttaggggagaactctactcgtttacaagttattgatgtcaaagcattaataagagataatggtgatcggttttataatcctttcattggaaccatagaccaaaaaattgttgcaggtgaagatgcccaatcttttcttcagaatgtgataactgattcaaattttaagggatctgtagcagccatggatattaaaaaagatgctgaaggattcttttctggcactctttccgctggatttaagtctgcctctaaatattcatattcttctaaatattcttttgctaaagcagaagtgacaaagaaacaaagaaaatattttgtagatgcagatgttgagcttttatctcgatatttatcttctaactttgtgtctgatttaggtaaatactcagcagatcaaattgttgcaaaatatgggacccatgtacttactaatattacagtaggaggttcttatatagcttattataaatcggctattatagaagaaaatacaggtacagagaaaaaacagacagtaagtgctggggcgaaatataatatgtctaaagtcggtcttgattttgatgggacttggagcacaactacaataaccgaggctaataaaaagaattcagattggacatgtactattcaatgtgtaggaggcactacttctggtactactataactttgtctcctaatcaaggtcccacgactactatcaatataggtgcatggtcacaatctgtagacgatactcattcgcggttggttgatgttgattggaatgctacttatcctatttatgatttggtttcagacccagtaaagaaggctgatttaaagctagcagtagagaaatatataaatagtaaaaaaatatcagttattaagttggttacattatatcaattatattggcctaagggtgtaaattgtcactggtgtacttcttggtcagaagttcttcggtataagaatgaagggcatgaatattccggtgtttttgggtatatatgtgctgaagaggaacctggtactctgcctctttatagaatgtattggtctaaagggaggaattcacattatattacttcatgggctgaagtacgtaaattccaaaatgaaggtcatgaataccaaggtatagttggctatatttatacatggaatgaagttaatactattcctgtttatagtttatattatcctaaaggtcgagatagtcattatttaacagataaggcagaagtagatcgatttataagggagagaggtgatcagtatggtggtattttaggatatgtttatccataaatattgtcggttttaaaaagatataggtagattttttttcttgttcaaataatagtgttcgctcgagatccaaagaaagcgaatactattatttgtaaagggatattcagtaaatgtctctaaaaaataagatggcatatgaagatgatagggcatgaccatttcatatgccattcttattgtcatttttccgtgctttctcacatacttctatccgacaggacatgacgttccggaagaagtctgatgacctcttctgattctgtgagtaaaatcatatcatgctgctttagctgttttgtttctgattttttctattatcagtatggcatttgccgtatgtattccaaagaaaatccacagtatttccgtcttcctgtttctggcctttatccttgagagcgagtaatgttgcttttgagtgccgaagcttccttcaagccgtgttgccctttcttttgagagttcgcttctaagcaccttcctcaaaggctcatctttggccgcccttcccttgcgcacaaaggatgtggatatcccatattttgtacagaactttctgttggcattattggcatatatggaatcggcagccacacatcttacccttacattcataagcttctgctgcatacggatacagtccttcaagcgtataccctcattgaatgccttgaacgagaggtgttcgatgaacgatatgccgtctatctgtatattattgacctttgcaccgaactcgacggacttggtttccttgcctctgacgatgggacgtacataatgacggtcaatgctgacgatgcggtcactgactttccgcccttcaaacatttccttttcttgtacaagcacctttctgatgatggaaagacgcttatgataatcctgggtatatcggagtaaagcaccgtactcgctatggatcccatccctttgactgaggagcttttcaagaagcttgatcatacggcgcttaagcattcttgtccttgaagctctcctctttcttttcttgcagtaggacagataggattccgccacattcctgtatttgttgcgcggacgccttatgcccagctccctgcaatgccggcatatatgcctgtagagccattcgaggctttcccaaaggagtttcatgtccgtaggaaaacgcatgtggctttcatagcatgtggcatcggtcatgcagacgtgaaggttatcaagataaggtttccagtgtgaagccaggagctcctggaaagaatcaatgtcaaggcgggatgctatctcattacggatggcactgactatcttgaagttggttatgggaagggacgggggaatcataattccacagaaaatctggtagtgtatgttcccgttcagatgttccaccagttgcctgtcggagaatccggtgtatgccttcaggaccataagggcgatctttgcggaaggactgaatctgttcctgcgtcccaggcgccggtccgacaggccggcggcttttgccatacattcaaacggaaagaccgaatgaagcttgccaagctcactctcattaaaactcttgcggtatttttccagaatatcaaattctgtaaaacccaaagtagggtgaatttctgaaatattcactatctttgccatatcttattagtttggatatttcccccgttttggccgtcaaaccttattttcgggggaatacctaaagatacaaaaaagccaactaattcgcaatactttgtgtatgaattagttggctgattttgtaatatttaatgaatgtccctgtaaaatagttttgtttattgtaatctgtttcattggtatatttcttgaataggaatggctagcattaccggtttattaaattcttcccacaagaatatattataatttagtgatttgggaattttctcttatttttttaaggtttacatatttctttggtttaaggcctaatatatatggcagtaaatgaatgaatctatagatacgtgtacttattttcttttgtttcgctgaatcatcgtatggagtcagcctttggtaatggaaaaatagatgccgcaaaggatgcatagcatggtatgcccacggtttacgtccactatagtgtaagatgattggatgtaaaatggcatctgtgtatgatggtttccacgcaggggatgtatatctgttatttctatagaagtcgtcttgaacattccactttatatctattagtaccttttggtcgtataatagagcatttaatatgtcttgatcatttagaataatgcgatcgggatattgttgataatattttatacattgttgctcgatattatgtttgcgccaatatgctaagtttaatagtaaaacacctccgtttatgtagttgtatgagggagcatattgtaatctttcaaagtaactaggattagggctgacagtatcttgtacccctgctagtgctaattggtttagattggtatcccataattcttttaaggatcctaaaacaagtgtatcactatctagataaatcactcgtgagattgtagaaggtaatatcgaagccaacacacatcgatagaagacaaccatggaaagacgttgtttttgccacttaacttcataattttgaagtttttcatgtggaatatagtaaaaagctatggaagttccatatttttctgctacttgtgacaaagtaagaacatcttctttgggtagatgccctgatacaatatgtagcatgatatctttaggatcattattttctaatattgaaactattgtgactgcgcaataacgaacaaatttggaatctatagtaagtgcaatatgcatcattagcttatgagtttatatttttaaagaaattaggaatcgttacatccggaataatgaatccgtctttgcgaagtgcttcaaaataagcactgccgataacacgttcatattcagcctctagttttccttctttatgtaactgatagaagtagcgccagtggcgacctccgtgtctgcccttgtgttgctccagttgcttgccgccatttatcatcttttccataaactgctgcttgccgcgtatattgtaatgatatacatggatatggctgtcggcagagttttgtgggaacatggttactttatggtttcccattgaaatttgcaggtaaccggcagtccggtgaatgacttttttgttctgacgctcaaacagtgaatagagtgacaagtcatatttttcaggttcggttaccgcttttacagtcttatcccattgccaaaagggtttttcttcttcaggatagacacttctcatttcacaattcagcacattggcattggtggcatataattcatctttcaaattgccggtaggggcataccataattcgtcggcatcggcattgataatccagtcggccttataaatggttttggctttccaaatcatacggtctacccagtccttttgttcatagttggtagccttttcttctatcacttctttaatccaccctttttgtttgtatttacggataatgtccggagttgagtctgtggagttattatcagtaatgataaacccgtccactcccatcgctttatggaactgtaaattctcttccagcatcccttcttcgttttttaccagcaatgtcatgaataatttgacttctttcgtttgtttaaaagccaaaggaaattcggatataacgtgccctattttggatagtaataaattgctcataaataaccaatgattattgatttctacctgtcatattagagataattaatactattgtcaaaagaatttgttttattctgaactcattataatagataacgtaatccttagttttctcataatattctgatatttaattatataacaaatttactctttttctgtaaatatagtatataaatgctagtttattatgaaacattaactggtaagggcgttaccgttttttaactcataattccaagtttttcatgtattccgtcgcaataggctttccataatcggggtatatctttccattgataggcttttgcaaacggactggtgaacaacgcgatgaaaatatatcccattactccgttgaagccgcgaagatatttcactgctatgttgcgtccgtagtgatggtttaaataagttgaattacggatctggtaaaagcgtttccactttttcttcttgcttcgctcattccatgtgtcgttggagaagaatttctctttatccatcagggcatcaggtatatagagtattttgtaccctgcccgtatggtgcggagacagtaatctgtatcatcacagaaaatgaaaaggtctttattgggaagacctatcttctcaacgacttcacggcggatgaacggaccttcgaaagctgttcccgtaatttctgtcggtgaggtgatgtgccgtcctgccagtttcttgctgtacatggatacaaaaggattgctcaggttgtatgcctggaagtcatgggtgaatatttctccttcgagcaacctgcgaggggccagtatgccgatatctttcttgccggtatacggcaagagttgttccagacagtcggcccgcggaaatacatcgtcatccatgcaccaaatccagtcggcacccgcctgataagcgtattgtatgcctgtatagaatcctcccgcaccgcccacattggtctgattgattactgtcagcccttcctgtgcggcaagccattccgttgtaccgtccgtgcttccgttatttactattacaatggaagatatcggcttgttttgttgcagacaacgaatatttcttttcagaagttccattcggttgtaggttacaactacggctataatgttcatgatgcatttagtttttagtaaaggttatctatttttcccggctgtacgcttctataggctctcatgagctcaaagcatttttccacatcaaagttccgtgccttggcgtattcttctgccatccatcggtgcatttgtggagttgccggcaggcgttcaaagtttttgcagccggtcttcatatctatggggccgatgtacatccggttcaaatcgacaatttctattgttatgccattgggagttttctgaaacaggatgttggcacgtccgtagtctttgtgggcgtatccgtgttcgtgaagacgggcggtcactttgcctatggcgcggaatacttcctcggcgtagtcaaattgctgtgtgaacaggttgtcgtaaatgtaggggcaggtggagaggaggctgatataataacttttatcgaacagcagccctgaacgtatattcatatatcccaccggttgcggagtgcctacacctattttcagcagcatttctgcatggtcgtaagagcgttttgccttggatggacgaaatatgccatatacaaaccggttgataaggtgggggctgtgaaaggatttgataacatattctttgccattgtattccattttccgcaattcattgcgcccttggtgaataacagtaccttcattcctttggaaacgttcgggaatggatactataaattcttccagatttttgaaatcagggtgaatcactaaggtgcggggatgaaacaaacgctctgtcttgctcatatcattataatagtgttaaattttgtctagtcctttggtatatttcaaccagtaatattttaaaggattcttgtatttcagttgtttccacggacggctgctatggggcctgtgccatacgggcaacgtggtgaacaggtagttttggaaacctcgtttcagtgactcgtgcgagatggtcacatcataccagttcttgcttgggtctaatgtctgaaagtcaaatgctttcagcagtccgggggtgagtagtgaacagcagaagctgcaatgctttttttccgggtacacttgattctcgtgtcccttggcgtgtaggtaggggtaattgattacgcctttttcatcggttgtcacagctgctgcaattccgcattgtttctgttgcaatgctccattgtatagtgattgcaatgtgttttttttgacaataacatccgattccacaatcagtaatcctgcatctgcttcgatggcttctttttgtgctgtttgtaacaccagtagatagttgggagaggggtggtcggtcaggtctgataagttgaccagacgaaaattccattgacgggcggcctcttccagccgatgggtattttcttccgtgctgaaatcgttatagacagtataagtgaaaggaaccaaaatatccgattccatgattgcttttacggtttcaagcgtggagtcaatcgaatcttttacgggtgttatgatatgaaggcacttcattggtttgttatctatgttgtttgtcaatttaggaatatcatgcaaatttagcggaaaaccttggggagtccaaggatttccttttatttaaatgtctttttgcataaggcgagggcggcggctacggtatcgtccatgtcggcgtatgcgtattgtgccagacggcctccgaataaaacgtctttccgcccagaggccagttttttatattggctcatcatttcggtgttccgcttgtcgtttatcggatagtaaggttctttgcccggcgcgaaatcatcgggatattcatacgtgattacagtggtgggctgtgtgccgaattcaaagtgcttgtgctcaatgattcgggtatagggtacctcacgttctgtataattgactactgcgttgccttggaaatcttctgtttccagctgtttatgttcaaagcgcaggcttctgtattccagatgtccgcattggtaatcgaagaactggtctatgcatccggtgaacaggatattgtctgccaatgcgtccagttcattgcggttgctgaaataattggtgttgagacgaacctcggttccttccagtaacgcatcgataagggcgttgtatccgcctttggggattccttggtagctgtcattgaaatagttgttgtcataaatgaaacggaaaggaatacgtttgatgatgaatgccggtaattctttggcggaacgtccccattgtttctctgtataacctttgataaggcgatggtaaatgtcttttccacatagctttaatgcttgctcctccaggttggcgggggtggcgatatggtcaaattctttacgttgctcttctatcttggccttggcttctgccggagtctttactccccacagctgataaaaagtgttcatgttgaagggaagattgtataatttcccgtcaaagtaagccaaaggggagttggtgtatcggttgaattcgacaaagctgtttacatagtcccacacttctttattgtcggtatggaagatatgtgcaccatatttatgtacatggatgccctccatatcttcacagtagatattgcctccgcgatgattgcgcttgtcaattaccaggcaatgtttacctactcgttttgcctcgtgggcaaaaacggcgccgaacaaaccggcacctactatcaaataatcatatttttccataatcacttagtttcttcctgttgtctgcgcagccactcttctttggttcttttccagcggttatggctccagagccaatattggggatgcgcttttattgtttgttccaattctcgggtaaacaaatcggtcaattcaaaatcgggtacttgccggggggtgtcgcacaatggtttgagccggcagtggtagtatcctcttttgacccgtgttacgtcagcataataaatcaaggcgtccacttgcttgcctattttctccgtaccgatgaaaaccggtgtttcttggtttagaaattcagtccagtgatgtatgctgttccacttgggtgcttggtccgaaataaatccgataattgccttttgctttgtccgtttcaattcaatgatgcggcgcaaagtcgttttcatggggatgcattcgcctccgaactggttgcgtaatcttagaaatagtttgtcgaaagcctgattgtacagtggatgatagatttgtccgcaggatatgtctttggaaatccaataaggcaaggatgcaatccattcccagttgcaataatgccctaaatagataaaacagaagtctttgttctttttgttcatgctttccactatctcgtccagtccttcaaaagtcattcttctcatcagttgtttttttgaaatggagaataacttgagcgtttctactatatagtcgcaaaagaaagagtaaaattgtttctcgatttggacaatctcttttaaatctttctcggggaatgagttcgataaattattgcgtatgattttacgtctgtagcggatgcaataatagagcggataaaaaagaagatcggatatgaaatataagaatcgcaagggtagaagcgaaagcaaataccacaaaaagaaaacggaataatatatgagatttatttgtttcatttaactgatgactttgtttatgtgttctattaccatttcgggagttatgccttgcagacaggcataatcttttctataacagtgcttttctccggataaggaacaaggacggcagggcaggtctatctgtattgtgtttgccgcagactgattccatcctgcaaagcctgcacagggatgcgttgccccccaaatggatacaaccgggatgttcactaatgatgcaaggtgcatattggcggcatccattaccagcatgacgtccatattgctcatgagggccaattccatatttatggttagtttgccggctgttgagatgacgttggggaaatgttgggcccattcttccaatactttgatttcttttttcccgcctccgaataagaagatttttgtatggtcgcgtgcagatagatgtttgaggatctgctcttgctttgacaacggatagattttgcctacatgtgttgcaaagggagcgattccaatccatgtttcttggttcttctcaccggttaacggagccaggctggaaatattgcctttattctttccgaaaagggagaggaaacttaaccggatggggtaacctatctgactgagcgtatgggcacagcgctgaaaaaaggagtcttgctctgtatatattttatgtttccgccgtatcagtttttgcagttcccgcctgttctgcttgatgtgggctgcttttatgcctgccagacgaaaacgccagcaaagaaaacggctgcggaatgtgggctggaaagcggctacggcatcaaatttttcttcttttaaatcattgtacagccatcccagacccattaatccggcatgttctcctctgaaatctgccccacggaaaataacattgtccggcacattctcgaataagggggagaatgtgtctatgctcagcaccatgatttgatgctgggcatattgcgtagccaatgagtgaatgaccgggattgccattgccacattattgatggatgaaaagcagattacaagaatcttggacataacagctgttttattgaatgtacaaatctatgcaaagttttctaatcagccaattattattcggtaaaagtgtctacctttgttcccaagcaagtttttgaaagatgaaaataattgtagataataaaataccttatatacatgaagctgtcgaacagatagccgatgaagtggtgtatttgcccggcagtggttttaccgccggggatgtacgggatgctgacgcattggtgatccgtacccgtacccgttgtaaccgtgaactgctggaaggaagcaaggtgaaattcattgctactgcgaccatcggttttgatcatattgatgtggactattgtgatgaggcgggaattgtatggaaaaattgtcccggttgtaatgccggcagtgtggagcagtacctgcattcggtattattattgttgaaacgccggaagggggtgagattggaagaaagctgtctggggattgttggggtaggacatgtgggaagccgtatccaacgtatggcggaggcattggggatgcgggtcttgctgaatgatcctccacgtgcggaccggggggaaacggaatttgtggatttgtctgtactggcacgggaatgtgatataataacctttcatactccgctgaacaggaatgggaaatataaaacgttccatctggcggatgcggatttctttgccggtttgcaacggaaaccttttattgtgaatacttctcgtggagaagtaatagagacattggctttgcttgatgcgctgaagacaggccggatacgtgatgcggttattgatacgtgggaaaatgaaccggatattcacccggatttgttgcagaaagtttttttgggaacccctcatatagcagggtattcagctgacggaaagtcgaatgctacacggatggcattgaaggagctttgtaacttcttccatatacaggctgattttaaaatagtaccgcccgctttgccgtatatggattattcttctgatccggaagaggcttttctacaggtgtatgatccgactcgtgacagtgatgcattgaaacggcatcccgaagaatttgaacatttgcgggggaattatccattgaggcgtgaaatttcttttttaccgtagggggacatttcaatgtacccccacggtggccagaacttttagtctgcttttgctgtttgcatctcttctgctacaatctgttcgcaatcttcaatgctgtatcccgatgcgggttcgctccaataccataaggcgggagcttgttgtaatgtatccataatcaattattttttagatgggttattcaatgttatagttgtttccgaatgttggttgccgcccagaatacctgttcctccctccacattgctgtaaacccgtagaggttcggctagtccaatgttacccaagcctccttctaacgtgcttccggcaattttttgtaaggacaacaggtataaaaagtaggattcggaaagggaatagatggaaatgattctttgttctgtttcgtctaactctgccgttgtctcttttatttgtaaagtataggtttgcccgttaatgctttggtcggtaaagagggctcctcctcttttttccaatccgttgaatgccatactttcgtccaatatggcatcctgttccttgaatacaggatctatataatctatttctgtttcgtagtaaccgtaatagcccgtttttatttgtgtgattttggccagataataattgttcttttccggaaattcatcaaacgtgacttcatagtatatttcaaaatagtcggaaattgttccttgataaactccgttaccttttttaattgtatgactggcgttttttataggtactttctttggtatgatatcttctgccgttaccgtaccatattcgggggtggatgcaacaatttttatccggtctccttctgccgggattgtatttgaaaggaataaggtatccggctggtctgggttccggggattattcagtgttttccattgcatggtttctatgtattgattgttgatatagagctccacatgggcgtgagggagattgacataaggcttcttgtctggatagaaccaggtccgggtgatggaggccattaccactgtgtcgggggatactacactgtttattactattttgggcgtagtgcgatattcgtccaaatctatttttcgataacaggaggtaaggaacactcctagaagtaatgtatatagcagatgtttcataatcatttaaaatttataagtgtaagaaactgatggtataatgggaactatgcccagggtatagaagcagtcgttattataccaccatcctttgcgtatgctgacgggtgccatgtaggaatagacattgtagatgctgatattccatattcccatccggttctttttctttggccggtaaatattgatgcccaagtcgagtctgtgataggcgggaagttggaaattattacgttccgtataatagtctaatccgcctggatctatataaggaggaaccaggctgcctcccggaaacggatgttggggagaaacggcctggtagttttcgaaagaaaccgtgagccggttaccggttgcgtaggtccagcttccggtcaactccagtttgggcttgattttccaattggctattatattgaatttatgccggttgtcgaatttggcaggaaaacgcttgcctttatttatctcagtgaactgtctgtcattccagcttagagtatagcctgcccatccggttattttccctttttctttgcgggcaataagttctacgccgtaagaacgtccttttccttgagtcagtttgtcttcccagctggtggaaggagggagaaactggtagttgtctttatagtccatcagatgtttcatccatttataatatccttctatggagaaagagtagattttgttgccggtggtgtaataagctcctacagccagttggtcgctctgcatcggtttcagcttgcggctgaccggtatccatgtgtctgtgggcaggttgatgtagctttcattgacttgatgtacatattggctcatccgggtataagaggctttgaggctgagttgcggattgatcaggaaacgactggaaaaacggggttccagggaagtgtacgttttcccgtcaatggtgtatagtccgaggtgaaccccagcgttcaaacgtattcttttgttcattttccagtcttcttccatatatatgcctaattcatgtgcaggcagggcagtgtcgttgttttgtctggtctgggtggtcatgccattggaaaaatgcgatttttcgtctacgggatgaaaacggtggtaaatataatgagtgccgaaatgcaactggtgggaagcattggggcggaaatcgaaattggctcgtatgctgaggtcgtcaatgcggttccgggttgaactttcctgtgatacgtagttggcttctgttccttggtagtagtctcctttcaaggtggaagagtagtgggtaaaggcggcattcacattaccgaagagttggttgttgaatacgtatgcccagccggtaaatgccatgatgtttccccatcgcagtctgccggtgtttctgctttcatatccattgtcaccttctcttttttctcctcccttcaaaaaatcgtttccccagtaaagaccggcatatccgcggctgcggtcattgaactggtggttgagtttaaagttcatgtcggtaaaagcgtatcgtgccactatttgggtttctcctttatttctggtagcgttccagatggcgatggttggggccgaaagcgcgtcaatccatgaacggcgtaatgcaaagttgaatgaggtccggtctttgaccaacggaccttccagattcaggctgcctgaggtcagtcccagcatggcgcttccgtgatattctttcatgttgccatcctttgtatggatatcgactacgctggacagtcttcctccgtaacgggcggggaaggcggacttaaagaattctacatcctttacggcttcggcgttgaaggaggaaaacagaccgcccacatggttgatctggtataacggattcccttctatcatataaagattgtcgtctccattaccgccccgcacatacattcctgccaatccggctgtgcctgccgatacacccggcaaggtctgtagggtttttataatatcagcttctccgaataataccggggtttgttggatcaggtctttgttgagacgggtatgtcccatatcggatgtttggactaatggagaagaggtatattctccggtcactaccacttcggctaattgctggtggctgttcagcagaaccggaagtagcgtgtcttgttccaattgtgtgaatgaacggtggaaactgtcataacctacataggagatgttcaggtatacatcgtttccggcttccagagtcagactgaaaaagccgtcggcgttgctggttgttccttgatggcttttggcatcatagatggaggcgcctataagggactctgaggaggatttgtctcgtatgaagccgctgattacaatgtttttctgttttttcttgaggatgatgtatttgcctgattgtatatattctacgggcagtttttgaaacagaatgcgcaaacagtgggataacggctgggcggttattgttatatctatcggtaacagatgttttgttaaggaggactcatacgaaaaggttacacctgtctgccgggtgatttctgccaaaactttacggatgggggtttgtttcatatctaatgttacgaggggctcatcatgttctgttccttttgcctcaatacaaatgtgcatgaggcaaaggagcagaagaaaagaaaatttagaatggaattgcatcattgggttatgtctagtttcgtatctagtgtttggtttatgatttcaattatgtcttctatcggagtattgtcaaaggtcgtggtcagatagtactctttttgtggaattccgccgatatggaccttatagacttcttctaattcttttactacctttttcaagggggcttcattataaacaaacacgtgggtcttccatgcaaaagtgttggggtcactttgtttgtttatttgcatttgtcctttttggttaatgaaggcatacatgccttttgtcaggatagcctctttttgttctttgttataaaaacggacttttccagactctacggttgccgaagtctgatttgcatttgccgttacttggaattgtgtacccagtacttgtatgtttgccagttcggtctgtaccctgaaaggacattgttcttgatgtgtgactgaaaaatatgcttttccatttaaagtgacgttcctgttttttttgccgtatgccaagcggtcatactgtaagaccgaattctctgccagcgtaatatggctgttgtccggaagcgtgacttctttgacggcgtgtgcggatgaggcaatgacaatccagtcttgcctgtcgtatatccaccaccaactgaatccggctatcaggaaagtgacagcagcgatagttatcagtctatataataagatagagttatttctttgtttgccgatacctagtttttgccaggcttgtgtcgtgtccagcctgttttcccgatagaaccgggctacaaaacgaatatctttctcttctttctccatgcgatcttctttctttttattgttaagacagggaaaagacaaaatccccctattcgcttgccgatttttttatccgaagaaaaaagtatatattttaatggctgtttctcgtaatgttttcagtgccttactgatttgatgttcgacagtttttatagaaatacccagttcggtggcaatttcctgataagtaaggccgtcacgtttggaaagcagaaagatctttttccgttcggtaggaaggtggtcgatggctgtccataaacgcgcgtcacgttctgaccggatgatgcgttcttcttctgttagatcttccaagtctgtcagttcggttgtttcacagtgtgtttgtcggttggttatcagtgtgagtgagcggttacgtacagtttggtacatataagctttcaggttttgaatagatgtgcctccgacaagcttctcccatacatcagagaaggcttgttggacgatgtcttctgcgtcatccagattttcagtatagcgcagggcatacatattcagcggacggtaaagacagcgaaattggtattcaaattccttgggtgataattgcatcctgtgttttattcttttttggaaggcaaacttacggcttttcttttatttgccaagcaacaagagatgaaaaagtctttaatttcatttagtaatgataacaattcgggtgcgggaggttattgtatcggcttttcggaggtagtcataaaatagggcaaacctcacggtctgccctatccgaaactttaatatggaatacctattgaaacaaaaatcacagtctttaccttaaaatattgcctttaaaagtttcctttatcagcattatcccaccaaagatgtgtaccgcctttgtcgccggaaataccgaatttgctggaattttcttcgtccagaagcttgattccgccttctactcccttagcgttggcatcataagcctggctgctataaattacgcggcgcacaccttcttctgtgtttacggctccattactttcattgacgaatgcagggaagaagcgtggatagccggtgcggcgttgttctgcccagccttcggtggatagagggaatagggcgagccatttttgggtgatgattctttccagcttttcttcgttgcttgcgctctcatcccattttacacttaatttatttacagccggagtgcttaattcggctttgatgggatctgtatagtctatttgggtgcttgttccgttgatgtaggcatctactgctccttccggatattctttgattccggcataagccccccgataagctaattcattagtcatggaaacacggattccattttcatataggttctttacactttcactgccaatatcccatcttaattttgcttcagccagtaggaaataggcttccgctgctttcatgatgggcagtggcatggaataagaggaaccgttgtttccttgaatccaaccggagaagttaccccaactgtttggtttggcaggcaggccactggcaaaacggatacccaggtattgactattggcagctactgtggtagtaccggcttcgtttttgatatctccggtattcagggtcatatataacggttggcgcggatctttggttccactcataatagttaccagattggcattgaatccacaatcaccccaattgaacatcagccacatttcattctcaagacttttatcgatcagaatatccttgttgactgttgccaaagtgttttgggcagcctcggtagcgattgccttaaggttcattccggcgttgccggcttcggtttcccgtttggacaggcgtaacgccatgcgtagtttcatcgtattggctatttttacccataggtctttgtcgccgttgcaccaacagtcaaaggatttcaatttggctatttcatctgctcccatggcactgatgtcagtaatggctgtactcagatcttcaagcatggctttatacaggtctttctggctgtcgaactcgaaatacacttcgttttctcccgataggatggagctgtaaggtatcggtccgtaggcatctgtggtcatcaatgttccgtaagcctgtacgatacgcatcacgcctgacaggcctctttcaccactggcgtcacattgtgcgatgatgcggcgggtgttattgaaaatatggagataatagttttcgtacataccaccgctatgtccccggttctctcccatatcaccgttggtgaagttaccgttgggagtcataaaataacctccataaaggtcaatagtcaggttggtccaaaactggaacatattttgctgaggaggataacagtaggtcatcggttcggtacattgtgcggcaaaaggaaggtctgccggatctacctgtatgttactggtattcaatttctcgaagtcgtctgtacaggaagaaaagatgtttcctgtagtcatggggattgccattaagaaggcgtatgttaatatcttattccgtttcatagtttcaagcattagaagttaagttttaaattaagaccaaagctgcgtgaggtaggcagtgcaaacatatctacaccttgtattccattacctgtacctgccgatacatccggatccatcggggcgtctttatggaagaaaaacaggttgcggccgatgatggctgctgtcaggttcttgcctgcacccagcaagttacggaaggtataaccgaaagtcacttcacgaagacgtatattggtagcatcataaacatagttttccacagcgtatggactgttgaagttgttgttaccggtggtacgatagtacttgtcggcatcaaattttactccgtccactgtaataccgccggcatcacgggcttcacctgaacgtttcgatacgccccatccgtccaaggcggcttcggtcatactaatcacttttccaccgaatttagcatcaattaggaacgatagtgagaagtctttgtagcggaatgtgtttgtccatcccatatttactttggcattcatattgcctgcgtattccagttcgtccatagaatcaccacttacgataggctctcctttttcgttttgcaagggtttgccgttttcatcacgcatcagatgacgtacatacagatctccgtagtggccgccttctttcaatataacttttgcacctccgaaatcggtcaatgtcagtccgttgggaaggtcatctaccaattctttgattttattatcattataagagaagttcaggttggtactccagctgaagttgtcagtgaactgctcgtaccatccgatattgaattcaaagcctttgttttctacattaccggcgtttacataacggtttctcaagcctgattcgtaaggagccgcaacggagaagaactgatttttagtgttggttttataataagtcaggttgatattcagtcggttctgtaagaatgtaccgtcaaaaccaatttctaaagaatgggttttttccggcttcaatgttctgaatggagctttgtcggggggagtgatggcaccttgagaacctagagaatagagcagattactcatgaatacaggtacgtcattacctacgatagaatagcttgcacggaatttgaacaaatcaatgttcttacccatatctacaaatttgttcagcaggacactacctccaaaagagggataaaagaatgaacagctttctgtgaaagccaatgccgaagaccagtcattacgtgctgatatatcaaggaatatgccttcacggtaaccgagttgtgcggtggcgaatactgagttcagccgtttttgggtcatccagttgtcatctttgcctacggtggacatattgccataatagttgttcggagtaaagatgttcggataaaaaatgtttccggaaccgggctgtgagaactgggaaccctcgccccataggtctacatgagaggttttggtttttgtaaaactggaacctgcggtagcggatagagaaaaatcattgaatgtatggttgtagcttactaaaacatcgccataaagttggtcgctgaaatagcggttgtctttcatgcgtcccatcggataaaggtttcctacgctggatgcgtaagcattgtgtacccagtgttcttctcctctttcgtaacgcatacgtccttggatattcagatccggagtaatgttccatttgatgcttccgccgaattcatagcggttacggtcggtgataggggtctgtctgttcaacatccaatatggattaccgaattgctgttgttgtgtatttgtccagttttggacatagcagcctcttgcgggatcatatacctcgaagttctctttatagccattccagtcttctcctctagggaagagataaacaccggtcagcggattccataagtaaccggcagctgcctgattggtgatgtgctggttggtaaacttggccgtgaaatcaatatgaatgtctttcagaatattgaaacctacttttgaattcaaattgtggcttcggtagtcattctggggagtgatgccttgtgaatagacattggcataggaaaaataagattggatattttcattgcctccgcttaaggagatggagttattcgttgtaaatccggtacggaagaatttttttgcatagtttggagctttgctgcttagtttctcaccccagctgaaagtaccgttgtcgctcattccataagtagtctggaattcgggtagcaccattgggctctccatcgtggtgttgctggatacattaacggaaactttacccgactgtgctgatttggtggtaatcataatggcgccattggctgctaccgcaccataaagcgctgctgccgatgcacctttcagcaaagtgatttgggcgatgtcgtccggattgattgtagacatggcgtcaccaccgtctcgctggcctccgtagttgctgtctacttgtgagttggtgatattcatcatgacaggaactccgtctactactactaacggttggttgttaccgctgatggacttattgccacggaacagaatcttggaagaaccgccggctccggttgagttcggtgtgatcatcataccggcacttttaccttgcagggagttaatcatattgacgctcttgatgtcattaacgtctttacctcctactgtttgcgcagaataggtcagtgtttcggattggcgtttaatacccattgccgttactacgacttcacccagtgtttctgtatccgatgccatttttacgttgattactgtacgtccgtttacaggttcctctatggttttcatacttaaataggagaataccagaatgtctttgtcaccggcttgcagggtatactttccgtcgaggtcggtcactgttccgatagttgtacctttaattaatacgtttgcgccgatcagaggttcgttagcgtctttatctattacagtaccgctgactgtatgcgtttgtgcatacaatgctgttacaaacactcccaataggaatgtcaggaaaaaagtaaaaattcgtctcataaggttagattttgaggttcgttcttaattagatttttgttttcagattaaataataggtttgttgataattgggcatgtttacccaatgggtttgatttgatagtttttcgcataggcattcagtttaaggttaacttatcaaggtttatttattaaggtttctgttaatctctctttaagtcggtcaacattattaatacaaatatcataaccgggttactaaacaaaaacttatattttttgtattttatctcattcttgttttcttattttcttattttgaaataaatacttatgtttgtgtaaccttaaattaaaaatgacctatgaaccttaatgataaccgcttaattattaaaaccttgaagtcgggagatcaaaaagtattttccctggtttatgcttcttattacaagccgctatgtttgttttgttcctcgtatgtttctcttgaagaggctgaagagatagtgcaggatttgatgatgtatgtgtgggaaaaacgtgagttgctggtagaggacttgtcgctgaaatctttcttatttaccagtgtcaggaacagggcattgaattcaatcacccgttcccatattacccgtcaggtatatgaagaatatcagagccaacagttgaaatctctgccggcattggattcttgttatggcacggagttgtttaatacctatatggaagcccttcattctcttcctaaagaactgcaaagagtatatgttatgagtcggtataaacaactgacccataaagaaattgctgacaagctggaggtgtcggtgcagactgtcaattatcggataggcaaagctcttcagttttttcgtattagattgaaagatttttgcctagaatagtcgcttcaatcacccgagggaaatattcgtattccaactggtgcacccgtattgccaatgtatctggcgtgtcagtgggcaataccggacaggtggcttggaaaatggtatttccttcatcatatcgttcatttatataatggatggtgatgccgctttccttttcatgggaagctatgacagcttggtgcacgcgggaaccgtacatacctttaccaccgaacttgggaaggagggccggatgaatatttactattttattcggataatcatgcaaaatggcatcaggtactttcaagaggaagcctgccagtacaataaagtcaatatgatattggtgcagtatttccagtgctttcccgtcggcaaagtcttgggctgtgaggataagtgacggaacactcagtctttcagctcgcttgagtacaccggcctgtgctttgttgacgataaccaatgctacttcagctgttcttttctctaaaaaataccgaataattctttcagcattcgtgccttctcctgaagctaaaattgcgattttcttcatgatgttctctattttggtgcacataaaacaaaaaaatgtgcaaaattctgcatttatttgcctgaatatttgctcagcccaagaaatatttattcctttgcaaccgcaaagaaaataaaataattcaatttattaactaaaaaattaaagttatgtctgaaattgcatcaagagtaaaagctattatcgttgataaattaggtgtagaagaatcagaagttacaacagaagcaagcttcactaacgatctgggcgcagattcactggatactgtagaactgattatggaattcgaaaaagaattcggtatttctattcctgatgatcaagctgagaaaattggtacagtaggtgacgccgtttcttatatcgaagctaacgctaagtaattatccttattttataatatggaattaaaaagagtagtagtaacaggtcttggtgctcttactcctgtaggtaacaatgttgcagaaacatgggacaacctggtgaagggggtaagcggggcaggacctattactcatttcgatgcgtctaaattcaagactcattttgcatgcgaagtgaaaaatttcaatggaactgattacattgaccgtaaagaacttcgcaaaatggatctgtatacacagtatgccattgcagctgctaaagaagcggtggaggattctggaatggacctcgaaaaagaagatttgaatagaataggtgtaatttacggtgtaggtatcggaggtattcatacttttgaagaggaagtagctaattatacactgaataaagatactgtcggaccgaaattcaacccattcttcatccccaaaatgatagctgatattgcatcgggacagatctctatcatgtatggtttccacggtcctaacttcacaacaacttctgcctgtgcatcttcatcaaatgctattgccgatgcatttaactatatccgtttgggtaaagcaaatgtaattgtggcaggtggtgcggaagctgctatttttgaagctggtttgggcggttttaacgctatgcatgctttgtctacccgtaatgatgatccggaacgtgcatcccgcccgtttagtgcaagccgtgatggctttgtgatgggtgaaggcgcaggctgtctgattttggaagaattggaacatgcaaaagcacgtggtgccaagatttatgcggaacttgccggtgtaggcgcttctgccgacgcttatcacttgacagcttctcatccggaaggattaggcgctaaactggtgatgttgaacgcattggaagatgcggaattgaaaccggaagatattgattatatcaatgtacatggaacttcaactcctgtaggtgatgtttcagaagtgaaagctattaaggatgtatttggagatcacgcttataaactgaatatcagctctactaagtctatgacaggacacttgttgggtgctgccggtgcggtagaagctattgccagtgtattggctgtgaagaatgacattgttccgcccactatcaaccatgaggaaggtgataatgatgaaaacattgattataacttgaacttcacgttcaacgaagctcagaaacgtacagtaaacgctgcattgagcaataccttcggttttggtggacataatgcatgtgtaatcgtaaaaaaatatgctgaataatcgtgtttagcaatataaaggataggataagacttctttttcgtaaggatagggagtcttatcttcgtttttataagatgcttggattctatcccaaagacattagcatctacgaacaggctttgcttcacaaatctttatcagtgaagtctgaaaaggggcgtttgcttaataatgagcgtttggaattcttgggggatgctattttggatgctgtggtggcagatattgtttacaaaaggtttgaaggaaagcgtgagggttttctcacgaatacccgctctaaaatagtgcagcgtgaaacattgaatcgtttggctatagagattggtttggataagctgatcaagtatacggcccgccagtcttctcataacagctatatgtgcggcaatgcattcgaagcattggtaggtgctatttatctagacaggggatatcgtgcctgtaaatatttcatggagcatcgtattattgggccttatataaatttggagaagatttcccgtaaggaggtaaactttaaatccaagttgatagaatggagccagaaaaatcgttttgaggttacctttgagctgataacccaatcacatgatcagggatataatccgactttcgagagtgaagttctggtggaaggtatttcgggaggaaaaggaaccggttattctaaaaaagagtctcagcaaatggctgcgcgtgtggctttgggaaaaataaagaatgattccggctttattgaatgtatttttgcggctaagactgcccgtgagttgcctcaggaggaggtaacggtttctgatagtaagccttcagacagtgggaccgttactccggatctttctttggaggagattaagaaaacggatgtggtcgagcagataatcagtgaagcggaagaaaaggcttttaaggaaaacgcttagcggattttatcgatattgtttataatttattaattagctattccggtggttttgggtatgtccggcaggaatacataatacattggaatatgcccgattacatcaagaaaatgtagtcgggcatatttcatatactgacgggaattagatttcatcaggccatgggcaggtttttcctgtggctttgaatgtgggacgttgtcctcctgttgctcgcaaatagttccctaattccttggagagccgttttacgatgccgggatgttgctttgctacatcatttttttcactgatatcatttggtatgttgaaaagttcttttttaccggtttcataataatagattagtttccattcgtctttgcggatagagcagtccagattgatgcctggtccgtcattcccccagatattagggaaattccataccagtgcgcgtcctttggacgggtctcctgtacctttcagcaggggcataaagctgataccgtctatagggttgactgtcttatagtttgtgatacccgccatttcaagtatggtaggataaaaatcttcaattataagatatttgtcacaacgagtattcggggtgactactccgggccagcttacaatcattggttcgcgtattcctccttcatataaggagcctttaccactgttgagaggagcgttttgagtgtgaatttgtccgtcgcgccatccgggttcggcagctagccctccgttgtcactcataaaaataataacggtattatttgcttcatcatttttttccaaccagttcatcaaatcccccagacttttatccattccttcaattaaggatgcatatgcggcttctttgtcactaagtccttttttaatatacttggggaagaagcgcatatctttgtcaacaggaacgtggatggcataatgtgccatatatagataaaaaggttgattgtatttttttgctttgtccaatgctttgatagcttctcgtgtcagggcttctgtagcaaatatacctgtttcccaataatcttccaagccggggatagccattagtgaatagggttttccatcgcgggtgtgcccgtagttctgttcgctcagataagtagccagaccaccggcggcatgtccggctatatttacttcaaacccccaatgggtagggttctctcccggtgtgtcaatagaaccgaaatgagcttttccgcagtggatggtatgataaccgttctgtctgagtaactcaacgaaagaagtgccgacaaaggtattggacgttcctgttacttggctgactccgttgtagttccagtctggtaattgtattgtattgcttggtctgtcggtagctttgtttttttcaagcgtccagtttgttacacgatgtcgggtgttgttggcacccgttatcagactgcaacgggtagcggaactgatattgcaggcgtatgcctgtgtgaacatcatcccttttttggccagacgttccatattgggggtttcataggtttcgttatagtgggttttctgtgtccagaaaggtaaggatgtatcttgccaacccatgtcgtccaccataaataagatgatattgggacgttgttgggttgtttctgaagacattttttcttttgcttgcgtcgagattcctgttaaggaagcgagagcgaaagatacaagtagttttttattcatatcggctggttttataagttatttttcgattacaattttttggggggtatctatggaaatacttctcagttcttgcttgctggaattttctatccatacttttagtgtacctgtacatagtacgttcagctccaaccgattctctgttaaagagatagtttggacggtgctcggggatagatatttttcctgtacgccaatggctgcccatcctttccgtatggggcagagatgaaacagtttgtctgtaaatccgatgagttcgaatgtactgctgtctgatagttcttctgccttttgtgattcccaattataaagcagcacgcgttcttcggaggtggcagacattttttcaaaactgttccgaagagaataatcttctttttttataatggcttggacttgctgatgccggggggaaacattcaggttgtaacagattaatgtcattgctccgttgcctgagggagctgctactcgatacgcttttccactccataatggattggtcagtatagattctggcataggtacggcgggagcttcgggacggaacagtttgccttgttcgtcaattaaggggaaaatgttttccttgataaagtcccgaggggcgtccgacaggtagaccggacctccggaaatagccttggaacgtgccatcaaggtgccgcaaacggtatcgcaggaatgaaacatatcatggtcgggccatacggtttgtcctagtagcaaggtattggtataagactggaatagatgtgattttgccatatcctcatcatatttcttatagtctatgctgacacgggtgctgttactgtatgacgtatggtcagtattgatgacgttctgtgccatacagttcattagtcccatattttgccggtgggtctcggcttctaggcttcggttacagtcggttgcctggcggatactttcatggcctcccatgtagagtggtagtgtaaaagcttggttatctactttcagaaaatcgaatccttgttcttttaaggtgctgatgtagtagcgatagaaggaacggatgcgggtgctgtccgttcctggcagaaggctgccggcgtgtgggtatagggcttgtcggacgacttgtggaaatccgttttcgggggataatcccatccagtatcccgaaaggctgtaccacagtccgatccatttgattttattttcttttttgtatgacatgatttttttccatcccgacgggaaacgttgtttatccggtatgaaaccggtcagttgcctgttcttgtgggcgagatgaccgtcgtcaatcagtacataccggataggaatgccggatgcctctatcgttttcatatcgtttattaccttggattcgtttatatcatcatgataatgttcccatgtacaccaaccgagatagcggaaagcttcgaaatattccttggctgtgcggctttttaagtcggcggcttctgtatttttcatcagcgcttgataggcttgccgaatggttgaataaatatcttttccttgtcggatgagtagaagagggacttccggtttcagatagtcttttcctaaggtggatacatatagggtgacagagccgttatcgtttacttgcagccagcttaaactgttacggccggcaacagctttggcaaacaagtattctccgtttgtcagttccagcagtaatgcatctcccaacgtagatggggttgcattggaaggtattcccggatagcgggtgtcggttaattcttttaaatcgttgaacacccaaggtaggagccggttggtattgttgggccattcaaaatctaccggacgggagtctcggctgaagaaaatacctcggacgtacccgggtaaccgtaccggacaggcaatagtctgggtttgtccgggtatggatttcttataggatatgggagaagaaatggaagttaaatcaatcgtatctgtcattgacaaagcgtttgtgttcttgaatgactttcctttttcatatgtgtaatctgtttgcccgaaggatttcggacaaacaaatacattgcaaatcaggatacaaatgaatattgctttatattctctcatgattttttatttgagggttacgttataggcactgaaatgtctgatttcgggtaaggcaacggattgggttacggtgaggcgcaaggcggtggtttctaccggttcgaagtgtgcaatgcgtttgtgtcccacagactcgccggagcacactgtctgccattttccgttgactttcgcttctatcttgtattggcgtattctttcgcctttggcaatgtcttcttggatgatgcagtagttgaccggttgtttttcattcagattcagcgtaagccgttgcctccggccttgggtttccgccaatggtgtaccaaagcgccggtttatttcttctccccattcttttaaacgctgttcgtcacctgccggcaatagcccatcgggatcgggggtcagcccgatgattaacgtagcgttgcggcccactgatttttcgtacatatccatcaacgttgtcaatggatagatattattctcgtcatcgggttcccaaaaccattcgtggcggccgttggcaccacgcagggggctgtctgccatagctggtacccagtatttgccttcgggatcaccttgttttaataaggctatttggtctttttggctttcaatacgtttatgatgtgaacagggggccggaaaagtggaccagcaggggtatcccactgtgccggtttctgaacctccccagcggaaatcagcacggtctatgttgtggtagaacaggcagttgggttggtatttattgacgatgggttccacatcaggaccgtcacctcgtgggtcatcggctccgccatcaaaccaaatcatatataaatctccatagcgggtacaaagttcttccaccattttctcgcagaagcgtttataccacgcctgtcggttggcggcaaattctccgtcaccggctaccttgaaattatggatacctagaagtgaattccaccggatgcctacatagatgcccggctggataccatacttacggcaggagttgacaaagtcgcggacaatgtctcctttgccatcacgccattttacagctttcaggcagtatgggtttacgtcactttgccacaatccgaagccggtttcatgcgtggctgtgagtacggcgaatttgcagcctgcggctttggctgcctgaatccattggtcagtatccagttgggtaggattaaatatattataatcttcaatggggctgatacggttattgccttgtccgtagcggatgccgtcgaatacgtggaggtcataatgaaatacggctcccatttccgcttcgtgccatttcaattgatgcggtttgggtataatgacttccggttgtgcaacactcagtacacagttcataaggaagagaagggatgtatatagtatcttcataggttataaataattaaaaaatggatcttctgttttttgcagccatgtttttaattggcttttcaatcggtttaccagtttgggatgctgcatagctatattattcatttggtaagggtctgatctcctgtcgaatagaataatcttatctaccttaccatcggttgcatggatagtaaacgtatgtgtagcggtgcgtaatccccggtagcctgttgccggattggatgactgtatgtaataatagggttggacaatgcggttgttttcttttccgtagaggagaacggaagcaaggttgaatgtttgtacttcttccggtatttgttgctgaaagcccatgatggaaagcagggtcggatacaagtcggcaaaagctatcatggttgttcggtcggttttcggctttattttttccggccatgagataaggactggaattcgcatggattcctcataaaagatatcttttccggcttgttcatgagcccccatgcagatgccgtggtcagaagtgaatactacaatagtatttttaaataaacccaaacgtttcaattcgttgattatccgacctatattttcatcgactccggtcatgcaggcatagtaattgcggatattgtttcggaaatagtcacccatttcagtgcctttggcgggaatgtcgggacggttggcacataatgcctctacattcaggtttttatacatctccttgtatcggtcgggtaccaactcgtaaccggtgtgtggagggttcatggatacgactaaggcaaatggctgcgttttatctatatgtccgttgaggtactcaatcgctttgtcggcttcatactccggtccccattgattgacataataaaaactgtcccggggagcgtcagtgtcccagtacatgggttttaaatggtagtcgtaagtaccataagcggtccaatagtcaaaaccgtgccggcgttcttttggacaccattcgttccaagcaactgtaccatggttgttgtaagtatctatgtatggttcatgaggagcatccagatgccatttgccgatatatcctgtttggtatccattggctttaagtatatcactccagcagcgtgcatcttgtggaagttctactccataaggagcgttggcagaattgcaattgcctgttactttgttcttatgcggatacatgcctgtcatcaacatgcctcgtgccggtgaagatacgggatagctgctgacagcattggtgaaattcacaccttcacgggccagttggtccaggcaaggtgttttgacaggttcttttccgagacaacctaaagcatctcctctccactgatctgccatgatgaagaccaggttaggtttttcttgagcttgtaaatagatagaagtcaagaacggaaagatgaaaaatgtttttttatataaaaatttcatattaattcggtatgatattggtaaagggtgtgttcaaaggtacaataagaatacattgtaacgaattaaactacaccctttttgagttattttatctaaacctattgcagagcatattgattggcaccgacaggccagcctggattttgataaacaacggaagtggaaatatcgcctcctttctcaggggttgaaagacggaatacgtcataagagataggggtcaggtaattcgcttcttcaaagttgtagccattgttggtaatgatcagttcgttggcaaaatgcggacgtaaatatttagaattactaaccactaagccggcagccaattgtttcacatagtaaggctctttttgatactcttgccaattgaatccttctgtttgatagtttttcattttatctagtgaacgccagcgtaaaagatcatctttacgcatgccttctgctataaattcgcaacgtcgttcacggcggatattatataaagttttgtctatcatctgacttccggaccaaacagccagatcgttttctttacttagatctgttgcatcgatagttttttggaagttttctgatacgccggcacgctttctcaaagctctccagtattttttgctataatcatctagatttttgtttttcatatagtcagcttccatatagttgagatatgcttcgctggcgcggaatatcatataagccaaaggtgaattatccgctggagctacattgctgtctctccatcctttacgaactaaatatcctgtagctgttctgcttaagttttgataagcttgtagtagatttgcatagaccattcttccgtcttggtccatattaccacctctccaaaccatatcacccggtttgaatgttgattctacaaggcgtaaatcacgattctccattacatcggggatacttttgtcgcctttgtattctgtattttctggtgcataaataggcaggccattggtagttaggaaagtttcaaccatggatcgtgtataacctccaccttgtcccacacagccttcaccgttttcattgtatatgctatgataattgccttctactaagctattcactttggcatccgcactatacatacgccataataatacctctttgttggaagaaagatcatattgattgaacatattcatataatcttctattttatcagagatttgtattgcttctgccacttctttggcagatgccatcgcttcagtcaggaagaaatctatttcagtattaaggttgccattgaaagtaccgcccggccagcccggaccacctggtactcgtgcggttccttgatggtaggtttcccaacttgcttcatacagggctacacgtgatttaaatagataggcacactctctgttcagacggtgattggtcagattattactgcgcggtaataatcgggcaatggcttcgttcaggtcttctagaataaatcgggccacttcattacgtggcttacgtttgtttgcttccacattggcggcataatcatctgcgctaagttctgatttgataatgggaaaatctccgaatttcctcaaatattcgaaatagatgtaagctctgaagaagtaaatctcaccgatatattgctgagtttcgcgggtatcttccagttcccctttttggatattttccaaagcgtaatataacaatcggttacagtcgcgcaaatgtccttgccgattataacttcctgtggcggcaactttgatacgttgcggtagaaagaaatctacaggatctgttcctgcttggttatcactggtttgatcgttggtaaaaagattggtgtctttgaaatcgggcaatagttcgtatttcttgttacaataagcctgcaattggcttggttctgtgaaaaaaccttcattcacattgtctgtcaatggttctctatctagaaaatcgttacatgagcttatagcgaatgaagttgctattatagggagtatgatgtattttaatttcatgattatgatttatttaaagtttataatgtaatattaattccacatgatagagtatagcttaacggataactcataccgttttggtaaattagttctggatcaaaatttttactcatcttggtaccagtccataaattatctccggagaagaatagtcgtactttctccaggttagctttttgtatccatgctttaggcaacgtgtaacctatttgtatgtttttcaagcggatgtaagctgcattctgcaagtaacgactttgtacctgctggttttgtttacttccaataatggggcgcggataataagcattgagatttgctcccatttcatctccttcaggacggaagtaatccatgtgttcttcgtatccggtggaatcccattgccccccgttgataccccagaaaatcatacctttagaataagcggttctgtcgtcgcctcctacccaaacgtcacgtttggctacgccctggaacattagattgatatcaaatcctttatagtcagctcctaatgagaagccaaaacgaaagcggggtgtgtaatttccaataatggttaaatctttcggatcagtggcagacgtacctttttctatggcaggattgtcatccaggttagcgtacatgatatcaccggctttccaaatattgtttcctacattgggtaatttgctttggtcatgttgggctatccatgattgcatttcttcatcggtttttgctatgcctactgttttgaatccccatatttcgcctaattttttccctttccaataattttcaatggtgtttccgtcttcatctttggtgtaaaatgttttatcaggattgggatattctgttacttctgtttgagcatcagatagattgaaagaagcatgataccctactttaccaattctgtcctgccaagttagttgtaattcccagcctttggttcgtaaagaggtattattcattttgggagctgatgctcctactaatggagttatttcttcggcaggtcctaccatgtctttggtatcacgaatgtagtattcaacgtatccgttcagacgattgttaaatgcaccaaagtcaagtcctgcattatagctggtgacacgttcccatgtgagcaaggaactgacgagaccgggggaagatgctatattggacttgttggctaagtcaagcagccagcgtccgccggcatctacgctacctacagttatattttgaatagaataagtaggataataattatctgtattctgattgcctaggctaccgtaagaaaaacgtagttttaacaggttgacatatgcttctgccggactccagaatgcttcgcgggcgatgttccaacctatagaaacagagggaaatgtgccccatcgttggttaccgcggaagcgtgaagtcccatcgcgacgaatgtttccttctaataggtatcgtccttcgtagtcataatttaaacgggcaaaatatcccattgtagcccattcttttgaggagcctttcaaatcacttgtaccagtggccgtattgatactggggacattttcgttgatgacatcatagcgtttgccgattaattcgttgatgtaataatattcggtattcatacctgctgtaactttgaaattgtgcttgttccaggaatattcataatctgcatatagtgaagttgtcatcatggaagtttgctgtgtttgactttgcacaaatgtctttcctgctgctaaatcggggtctcctcctaaccatgcttcttccacgggttggttgtcacgggtatagagatagactttatttacattatattggtggcggtagctttctgtccgtagagtcgcctgtccgtgaatacctaatccttttaatggagtcagatggaaacctccggaagtgaagtaggtgtctttactgctgtttgaacgccctccagaagttaattgcattaatttaggattacgtgtatagtgtccgttgttgtcatagagaggcatcatgggatataatttggtcgtttctgcaaagaaacgatcgccatagagtttcacaaaagttggcatttctatatctgaacgtataaaacgagcgttaaaatctaaacttagccatttggtgacttgtcctgttacctttccactgatgttataacgttttttgttttcgtcagagtaattcatctgtccgttttgagaaaggaaagctcccgatagatagtatttaactttctcacctcctccggagatacttagattatgttcttgtccgaaagatgttttgtcaatgaagtttcttggccagttttgattatcattggaagcgacgttgaaagggaaaaaattgtttccttgtgaaccattggggtctgaggtgtatgggtattcactcgccatgtatttctgaatgcggtctatcgtatcatcagtgaaaataaaagtggtgccgcttcctgaatttttttgtgctgcattgaaatacttggcaaagcggtaggagtcgagcatgtcaggaatgttggtggggcgtgaccatctgaaattgtttgaatactgaatggtggcttttcctgcttctcctgatttggttgtaaccaagattacgccaaatggagcgcgtgaaccgtaaatggcagatgcggcagcatcttttaacacggaaatgttagcgatatcctgcggatttaacgagtttatgtctccttcggctccatcaattaaaactaaaggtgaggcactggatccggtattcaaatttcctgttccacgaatattcatggtgggattatagtctaatcgtccacctttgtcattcatgtcaatgttcaatcctggcatcactccttgaagagcttgtgaaactgaagtgacaggacgtgattccagtgtttttttatccacggtagcaactgctcctgttaagttcactttcttttgcgtaccaaagcctactaccacaacttcgtccagcgtttgcgtatcttccgctaaagagatttgataaaaagtttggttgccattgattgtaaattcttggggggtatacccgataaaggaaacaattagcacactgctttttgaggcttggattgtgaattttccatccagatcagtaaccgttccgttggtagtacctttgacaactacactagcaccgataatgggctcattgagctttttatccgtgactacaccggtgatgctgaattgctgggcgtacaggaatgtacagttgcaaagcaatatcaaaaatagaattgagatttttttcatgcttctctgttttttaattagacattaggttaatacattgcaaatgtatgttaatcagtgatgtggcttaatacacgttcatttcattcagcatgcatgtttaatgcatctctatattttttggtgaatctttgttgttatctcttttttattttattcctttgctacaggtaatgaattaaatatgaaccttaaaatcttatcactggttataattggagtatgtatattgctgccggatgtgtgctatgcttttttaagcaaagatgtgcatctgctcaatatgcaaaacggattggccgacaataccgtatctgctgtttataaggataaagaaggcttcatttggtttggaacccgaaacgggttgagccgttatgacggtaggcggattacaaattttgaaaggagtaggagttatcctagtatttcaaacttaaaggaggtttttgacggggtgctggcatttgtggataatggtgtcttttctgcatttgatttgaaaaaagaacggtttttgtctgtggtttcttcttcgggacagggtattccatctcgagggatgttgcagaggaatgattcgttggtttgggtgatttccgggagtgagctgcatttaatgaagcggtgcgcatcaaaagagggtgagcttcggctccgggttcaagaaaaatatacaggctggaataaccaggataatcttttggttgccatcacttattcttcggataaaaaaagtatctgtctgattgatgaaaaaggtagaattatcttgctggatgcgacaaacctgaattcctttcgggtgattgacctggggcgtaccggtagtctgtctgtaaattctgttttgtatgatgatggtcggatatggatttctacaattgctcatggggttatttattacaatgaacgaaccgggaaaatcaagcagttgacttatcatgtggctccggtatccgacagactttctcatacagatgttttcggtgttatcagattaaatgagaataaatatctggccgtaacgtggaatggatatacggtgatgacaatagataaaaataatcaggacgagatattgacagaagtttatagtaacacttcttctttgatgtaccgcaatcttgaaacgaggatgattgcggcttattacgattcacatggtattctgtggattggtacggatggtggaggagttatctggtcggatttgcgtatgcagttttataattgtttttatcaggacaggcataatgagatttgttctattgtagcggatgacgatcattatctttggttggcaacataccataaaggaattatgcggagccggacagcgtttggtacttcggaaaaaacagacttctttcaagtaggagatcaagatgtgaaaaaacaacagacagtgttgtgcagtctgaaagatgagaaagggaatttatggtttgggaattcagatggttcattgacctgttattataaaaaagaacgctcattcaagatattgcgattgatcacggaagatggtgaccttaacaaatcatctgtctgggccttatttcttgatagcaaaggccgtttttggattggtacacataaaggactttggttattcgaccgtgaaacgaacaggggtaagaagatacatttcaaagtatccggattacagaacttgtctcctctttatattcgtgctatggctgaaaccgacgatcatacgctttggctgggcactgcgaattatggtatatgtaaagtgataaatgaaaaagaactgcagaccggctatgaaaagaagtatggtatggctgagaattccgttcgttcattattagcttcgtctgatggtaatctgtatgtcggatacatggccggtctggcagttttctctcccggacaggatgcgataactcatgtatatactacccgggatggattgtgcagtaactttattggttgcatgactgaggatgcggacgggcaaatctggttgggctctaattcaggtatttcccgttatagccgtcatcagcatttgttttataattattacattgcaggcagtaaccgttctgtcctgcattgggaggatgtcctgttttggggaaataataaaaatcttacttattttaaccccgatgacattaaagcgtttaccacttccgaatctgtcgtgattaccggattggaggtaaataataaacctgtagagataggaagagaggtcaatgggcagaccattctttcacaaagtattttctatacgccttttgtccggttgaatcatgcgaatcgtgactttgcgctgacgttcaataacctttcttattctgaaagccagcagaagtatagttacaggcttcgtccttatcagcctggttggcttgtggccaacggaggggaaaaagtttcgtatgctaaccttcctgccggggaatatgtttttgaggtgaaaaatatttatccggatgaaagagacagtaaaataacctcgttgagagtagagattttgcctcattggagtgaaactttctttttccgcttctgtatgatggtgctgggagggataatagtttatatggttatgcagcgtattaaattacggcaaaagaggttggagcacgagttgcgcttggaacatgagatatttgctgctactgtagagcgtgacaaggagaagcagattcggatggaacgcgagaatttctttacgaatgcagctcacgagttgcgtacacctttaactttaatcttatctcccctgcaggaattgttaggaaccgtccgcccttcagacaccgtctatactaaactggctgccatgtatcgcaatggaacctctttgcagacattggtcgatcatttgctttatgtgcagaagattgaagcaggtatgattaaactccggatttcgaaagtcgatatagtggtattggcaaagcagataaccgatccttttcatgaactggcagaaacagaagggattaactttacggttgaatcgctgaatgagccacttttgctatggatagacgtggaaaaaataagttcggctatccgtaatttattatctaatgcgtttaagtatacatctccgaatggaaaggtgatttttaagatgaaccgtatcgagatagatggatattcattttgcagtataatcatatcggatacaggtaaaggaataccggaagagttacgggggaggatttttgaatcatttattaccggagaaaatacacctttgttttctaataaggtaggtataggcttgcgtattgttaaaaatacgatggatcttcatcatggcacggtgaatttggacagtactctcggaaagggtagcactttcacattattgattcctgagggaaatgcacattttgcagaggaccggtatgagattgttggtgctccggagatggaggaatatgctcttccgttaccggtaatgcaggcggaagggcaggaagacaagccttcgaataaaaaaacatctcttcttgttattgaggacaatgaggaaatccggcattatgtctgttctttattctgtaaagattatgccgtatatgaggcggcaaacggtgaagagggggttgatgtggcaatgagtaaaattccggatttgattatttctgatataatgatgcctgtaaaagatgggtttacctgttgccgggaattgcgtgagcagcctcggacagcacatatccctattttgatgctgacggcaaaggctgaggatgcggatgtgttgcaggcttcaaaaataggtgtggatgattatatgatgaaacccttcaatccggaggtattgaaggcaaaagtccggaacctgatactccagcgggaacgcctgaagaggatatatacaaagacgttgatgttgaagcagcaggaaagtgaaccggaagcggatgggaataatgctccggatgattttatacagcaaattattcatgtcatagaagctaatctggcgaatgagaactttaatgtaaaaatgttggcggagcaattgaatatgagtcagcctactctttatagaaaaataaagcaacgtagcgaactggctgctattgatatgattcggagtgtacggatgagcaaggctgcctcccttattatggagaacaggtattccattcaggaaatagccgaaatggtaggatatagtgatacacgtacgctccgaaagcattttaccgagcaattcggagtgtctccatccaagtatatggaaaaggattgaatctgcttcttatccgaagcagattcccatccgtttgccttgtacaatcaggtcatggttctcattgacaagttttaatttaccagccacttcattcagagggatggagccaatttccgcaccttgcagagagaccattcgtccgaattgtccggaagcaatcagttctgtggcatgtccacccatacgagtggccagattacggtcgtagggagtaggagagccgccacgctggatatatcccagtacagtttcacgggtctcgaatccggtttcatattctatttcttgggctatatattcggcggcttttttgccgtccatggttttgatgccttctgcgacaacaacaatggaatagggcttcccttttttcaagcgttcaatgatggtattgcctatattatgaatatcataagacagttccggaataagaatcacgtcaccgcctcccgccattccggaataaagtgcaatccagccagctttatgtcccatcacttcaataaccatgacacgttggtgtgaactggctgtagaatgcagccggtcaatggcatcggtagcaatggtcacggcagaatcgaatccgaatgaaacgtctgttccccaaacatcgttatctattgttttaggtacagaaacaacgttcacacctgcttgggccagtttggctgcggtcttttgggttccgtttccgccgatacatacgatacagtccagacctagatcatggatattctttaacatcaaagccggtttgtcctccgaggctgccgacaggcgtttcttgaatggcttttctctggaagtgcctagtattgtccctcccagatttaacaagcccgataatgatttttctgtcaatggttctacgtcattgtccagcaatccccggaatccgctatgaattccataaacttccataccgtaatgatttatcgctgttttgcaaactcctctaattgtggcgtttattcctggacagtctcctcctgatgtcaatattcctatcttcatagcctttgatgttaagttgtaagcgaccgtaaagataacaaaaaataaaagtaatgtagaaaactataaaaaaaataatgttatcagccattataatatagaaataagctatttttgcaagatataacgaatcgtatactaagacaaatgaattctaccagattaattagtacgctattcaagcccagacaaaaagcgacagccttgtatgcaactcaggctgaggcgctccaacataaagtgttttgccggctgatgaaggatgcggcccatacggagtggggattgaaatatggctataaagacataaagagatatcaagactttcaacgtgtacctatacagacttacgaagaaatcaagccatacgtggaacggatgcgtcatggagagaaagatgtcctgtggcgtggagaagtgcagtggtttgccaaatcttcaggaacaactaatgacaaaagtaagtttattcctgtcagcagggagggacttcatgatattcattatgcgggtggtatggatgcagtggcgctgtatctccaacaaaatcctgagagtcgttttttctctggaaaaggtctgattcttggaggaagccatgcaccaaactataatgtgaaacgaagtcttgtaggagacctttctgccatattgattgaaaatgtgaatccgttggtcaatctgattcgggtgcccgataaaaagattgcgttgctgagtgatttcgaggaaaaagtagaaaggattactcgtgccacaatgaatcagaatgtgaccaatctttcaggagtgccgtcatggatgatggctgtactgaaacatattctggaagtgaagggaacggataatttggcggaagtatggcctgatttggaagttttttttcatggaggggttgcttttactccttatcgcgaacaatataaacagcttattcgtagcgacaagatgcattatatggaaacatacaatgccagtgaaggttttttcggattacaaaatgatttcagtgatccttccatgttactgatgattgactatggggtattttatgaatttattccgatggaagatgtcggtactgaaaatcctcatattgttccgttaacagatgtggagttgaataaaaattatgcgatggtcatcagtacttcctgcggattgtggcgttatatgattggtgataccgtgaagttcaccaacaaacacccctataaatttgttataacagggcgtaccaagcactttattaatgcatttggtgaggagttgatggtggataatgcggaacaagggttggcaaaagcctgcgaggcgaccggtgcacagattattgattattctgctgctcctgttttcatggatgcacatgccaagtgccgtcatcagtggctgatagaatttgccgttatgccggattctttagagaattttagtcgggttcttgacacttctttacaacaaattaactccgattacgaagctaaacgccataaaaacattaccttgcagccgttggaaataatcgtggcgagacctaatctgttccacgattggctgaaagaaaaaggcaaattaggcggacagcacaaagtgccgagattgagcaatacgcgtgattatatagaagaaatgctaagcttgaaccaataagaacatgaattggaaaaaacataaattacctgctttgttgatgctgatgatcgtggtgtattcctgcgcaagcatgggaacaccggatggaggtccgtatgatgaggagccgcccaagtttatcagaagctctcccaagccgtatgcaacaaacaataagaataagaagattgccattgaatttgatgagttcatcaaattagagaaaacatcggagaaggtggtagtgtctcctcctcaattggaacaacctgatattaaggcaagcggcagaagagtattggttaacctcatggactcattgaagcccaataccacttataccattgatttttcggatgccattgtggataacaatgagggtaatccgctaggtaattatgctttttctttttctacgggagaagccattgatacactggaagtttccggaaatgtattggctgctgctgatttggaacctgtcaaaggtatgatggtgggattgcatgcagatctgagcgatagcgcttttgtcaagaaaccgtttgaccgtgtatcccgtactgatagccgagggcgttttaccatccgcggtatcgcacctggtaaatatcatatctttggtttgatggatggtaaccagaattatttgtatgactccaagaccgagatgattgctttttgtgattctattattattccttccatggaggctgctgtgcgtcaggatacgttgtggaaggatacagcgactatcgatacgattaaaacagtggggtatacccgttttctgccggataatattgttctaagagcatttaagggaataaataaccgccagtatctgtccaagagcgagcgtgataaagagaatcattttatattatctttcagtgcgccggccgatacgttgcctgttttgaaaggattgaactttgatgagaaggatgcgtttattatagaaacgactccacgaaacgactcaatttgttattggatcaaggattcgttggtttatcagatggatacgctggaggttcagttggattatttatatacggatacactaaaccggttggttcccaaaaccgataccatttatctggctaataaactgacaagagagcaacgggaaaaattgcagaaaaaagcgaatgaggaaaaggagaaggaacgtaaaaaaagggagaaaaaaggagataccatcagggtggaaccaactaaattcctgactatgaacgtcgatgctccgtcagcattcgatatatacaggaatatctatctatcttttgaagaacctgtggcaagcatagacacggcggccattcatatggaagtaaaggtggatagtgtgtggcaaccggctcctttcttctttatggcagactcgttgatgccacgtcaatatcagatattggcagattggcaaccggagcaggaatatcagttgactattgattctttggcgtttattggtatttatgggctgcatacggacaaagtccagcaaacggtgaaagtgaaaaaaatggacgagtacggaactatcttgttgaatataaaaggaactgctccccatgctgttgccgagttgttggatgcgaatggaaatgtattgcgccaacaaccggtaacggaggaaggaacggcggacttctatttcttgaatccgagtacgaaatattatatacgtttgtttaacgaccataataataacggagtttgggatacgggagattatgataagaagattcagcctgaagaggttttctatttcccgaaagtttgggaaatgaaagctaactttgaatttgaagagaattgggatgtgaatgctattcctatagacaagcaaaagctggatgaaataaagaaacaaaaaccggaagagaccaaaaaggtgcaagatagaaataaagaaagagctagaaaactaggccgatgaaaaaaactattctcatattattgtgcggctggtttgccattatggcaaccagggcgcaatgtgcggcacaaaacgaagctatccaggcaggtgaagaattagtgtacgatttaaagtttaactggaaattcatttgggttgctgccggacaggcaaaaatggacatgcaggctattacttatcaggggaaaccttgttttcgtagtaacttgatttctgtcagtaacagacaagttgatttcttttttaagatgcgtgatacattgacttgtattaccagcagtcgtctggaacctgtttattttcgtaaaggagccgaagagggcgaccgctatacggtggacgaagtatggttcagttataaaaacgggaaatgtattgccgatcagcgtcgtatgaggagggaacgggatacggtgaaatcgaaagaccaaagtgatgagtgtatttttgatatgctgagcatattgatgagggcacgttcatttgatgtaagtgactataaagtcggcgataaaatattgtttgatatggctacaggtactaaagtagagcagcaaacattgatttatcgtggccggaagaattttaaggcggagaatggtgtgaaataccgttgtttggtcttttccttggtagagtataaaaaaggaaaagaaaaagaggtaataaccttttatgtaactgatgataaaaaccatttgccggtgcgtttggatttatatttgaattttggttcggcaaaagcatttctgagagagataaaggggaaccgtcatcctctaacttccattatagaaaagtagcggtttgtcttgatatagtaataccgccgggccttggcagatgccgggtcggcggttgtgttgttgtatattcattatgaatggtatgttattcatcgaacagtttggcctgtctggaaataagtttcaaggtctttccttcatttaatgcagtaagaatagtttcaccccctttgttcactttgcataaagagattttcggtcccatgatttcggtaatccgtatttcaccgattttggtttctatattatgtccttccagtatgccatcttccactacatcaaagcgtaatccttctttgataggatcatcatatcccaggttgatataaatggtttttgccttgtctcttttggtagataccactttcagtattgaaccgtatactttgaagtgattttctacaaaaagtcccatttcgtatggcacattgattaatgaattctctaaagcgctatattgggtggcatctttaccggatgctgagcctgtctcttcataattgcgtgtgctgatagttactccgtcactggtccgtattaaatcaaggcgcagggtgaatttctctttataactgttctcacggctgtggtaacgtctgtgagagcttccgtcatcggttgcttccctttgtatcaggtttccttttaacaggtactctgctctgaagcggcgtgcatcttccagcgggctcagactgagatcacttccagccgaaacggcgtccactacattgatgcggttggtgttgcggataccatcgataaatgcgagacgaatcaggttgatcgccctgttgggtattttgatctcactattgaagtcatctacataaatcgtatatttttgtccggatgcttctaaggatatgactgtcaaaattattaataataggatattacgtttcatggttatacgaatttgtaaggtttgtaatgtagttcttttacgaaaatacacagttcgctgtttatttgcaagtgaactgcgttaaaatagatttcgggcattgattatttattgccggtgtttattttttcatgtttaagtatttggtattgacagataatgattatcttggtgcataaattaaaaggtagcttgtatatggggaagattcaagagaatgatgcaaggttgcagcagcttgtatcaatggcacgcataggatggtgggaggtggactttgatgaaggagtttactattgttctgagtttgtagccgatttgttaggaatagaagggaataagatttctgctaaagatttcgcgaatctgatttgtgagaattatcgggagcgtattttggaggaatttcgctctttccggatgatggagatttatgagcaggtttttccgatacattccaaatatgggatgatgtgggtcagtaccaaggtcggtgagaagcgtattaccaaagaaggtcatgtccgcgtcatgggtatgttgcaatgtatttcccggcaacggatgaatatgcaggagcagacggtagaccggttgaactctttattatctcgtttgaacggcatttccaagtcattgcttgattttttgcattctgatgatattaccttggttatcaataagattttaaaggaggtattgcgccaatttcaagcagatcgtacttatatttttgaattggacaggaaattgcatacggaagtctgtacctatgaaatagcagtggagggtataaaagaacgtaaggttttattgtcggaatcttctattgattatgcctcctggtggacaggacagatattggctggtgatccaatcattctttttacattaaatttgcttcctgattcagccggggcggataagcgtagattagaggaatatggagtgaaatctactatggtggtgcctttgaactcaaaagacggagtgtgggggtatataggggtggatatggtgcgtgagcaccggaattggtgcaatgaggattatcaatggtttgtctctttgggtaatattatcagtatttgtatggaattgagacgctctgaatctgaagcccggctggaaaaagcttatttgcagaatatttataagaatcttcctgctggtatcgagttgtatgataaggatgggtttatgacagatttgaatgacaaggagatggaaatcttcggtctccggcataaggaggatgtgataggattgaatttatttgataatcctttgctgccgcagggattgaaagataagttgaaagcaggagcacctattgatatgtcgtttaattatgatttcgaccgtttggacggctattattctacttctcgtaccggtactatcagtttgatctcgaaattcgctccactttatgatgctttgggcaatctgataaatatattgttgatcaatattgataatacggaaacaacaaatgcatatagcaaaatacaggactttgaggagtttttcacattgattggtaactatgccaaagtaggatatgcccattttaatgccttgaaatgtgatggctatgctgtgaatagctggtatcggaatgtaggtgagaaagaaggaactccattgaatgagattatcaaagtgcattctcattttcatccggatgatcgcaggatgatgcttcgcttctttgatcaggtattgatacgggaagccagccatctgaggcgtgatgtgcgtatattacgtgaagatggcacgtatacatggacaagagtcaatgtaatggtacgcgattttcgtccggaagacgggattattgatatggtttgtgtcaattatgacataactgaactgaaagaaacggagcggaagttgatagcggcaagagataaagcggaagagctggatcgtttgaaatccgcttttctggctaatatgagtcatgagatccgcactccgctgaatgctatagtggggttttccagccttttaacggaaacggaagatatgaaggaccgcaagcagtacatggctattgtacaggagaatacggagttgcttcttcagcttatttcagatattcttgatttatcgaagatggagtcgggagcttttgaatttgtcaagagtgatacggatgtcaatctgctttgcagtgagattatccgttctttacgcatgaaagtgccggccggtgtggagctggtgtttgaagaatgcttgcccggatgtcatgtatgggcagacaagaatcgtttgaatcaagtcatttccaatttcattaataacgctttgaagttcactttttcgggcagcataacgttaggatattataggcagacagatgggtatctgcggttttatgttcgtgatacaggaatgggaatcccgaagaataagataaaaacagtatttgaccgttttgtgaaactgaacagttttgttcatggtacgggacttggcttgtctatttgtaagagtctggtggaacagatgggtggaactatcggtgtggagtcagaagaaggagaaggctcttgcttttggtttacttatccttatcaggaaatggctggtagtattctggtaccgtagaggggtttgattaataaaggtttatagctgtaggggtgaattgagttcatccggatacattgattttgtggtatcgggtgggagcatttcacccctacagtgaaccgggattatatgttagtctagtttcttcatggcgctgtgtacggaacctgcccaataattgcgtagtccgaaaccgcgtgctttgccgttagtcggtgcgctatacagaatctcacgggttttcgtgttgaagaatacaatttgataggtcgctcttgcatcagccttgtttaaaagcatggcaatcataatcaatcctgttttttcttcttgagagaggatgggaagtgtcttgatgacttcttctatctgtttttcatccagagtgtatccgctgttggtcgtcatgatctcatcgggattgatggtcttgttggcatcgtttactgcctccaatgaggttacttctacattgacacccagtcttttgccaatatcatacttcttcggctcagtgatgaaaagcttgttgatgtcatcaaaagtatatttgaactgcatggggccttcttttgctccgtacactttggcacgggtaaagtctatgccataaaatgtcacggaagagatgtctttcaatgcgtctttgttttgcccgaagcaagccatgctgcttacaaggaataataaaacgagtaactgtttcatattagttcttttttaagtgttgttttgttgctgccaaaggtagaaaaatattatctcaaatcaataaatttaactatttttcgactcatgggcggcatttgtattttcgcgatatactctgccgattcaaaattgatactcggagccacccgtactttggaacggaacaggtctttgatttctttagcgaaggcttcgctgcggttttcacttccgatgcggatcagtatttcatccgttcccagttcattggtataaacctctacaatgtaattcttgatatgggggatgttatccagaatatcgaataaagcgggtgggtaaagggtcgtacctttatattttatcatttgtcctttacggcccagtatggagctgagacggatggtgttacgtccgcaggcacaaggttcggtataatggtaacagatatctccggtcttgaagcggagcagcggcattcctcttactcccaaagtcgtaatggtcacttcgcctgcttccccttcttttacaggttggttgttatcatccagaaactctacgataatcagttccggctggaggtggccaccgtgaaattcattacattcggtaaacgaggattgcatttcggtagatgcgtaggtggagtaaagttgcagggaatcccatttctcgtgtatccgtttacccagtgtgttcagggtgaaatcgggattgcggagtgcttcgcctatgcatacacatttctgcatggagcagtgatggtaatcaatatggttcttttcggcaaattcaatcagtttgatcagaaaggaagggactaccatgccgcaagtgggatggatgcgccggatagtgtcccattgcagttcgggaatgccgtttcccacacgggctacccccatgcccagctcacgggctcccatatagtaggcgaggcccgccatgaaacgtctgtcgatagtggtcatcagttgcagtacgtcttgtctgctgcatccggtggtggtgaatgacagatattcgttgtaggccagccggtcaaggtcctcggaagtcaatacgaaagtgacggggtcgcccaaggttcccgaagtggtgacatagtcaataatttcatcgcggctcacgcaaataaaatcttcattatgaagttgcaggtctgtcttggtcgtgacaggtatttgttgcaagtcttctatggtttttatctgttgtatatcgatgtgatgtgcttggaacagacgttggtagaatcgtgaatgattctgcaaataaagcagttcctcagccagccggctttcctgataggctttgatttcttcaggggagcggaattgtatttccggattcttattcattttagttgtttattttatgttctatacgttctgattcacttcgcttggggataggaagcaagagggctttcttccaattgcgcagggctttgtcctgctgtcctgtggcatgatagtaatctcccagcaactcgtacacataaaagaaatgagggttggcatgttggaaggcatgcagggtctgttcgtccagccgttctttctttttaatctgcttccgtagtacaggagccagtcttttgtaagtcatcagctgttggtattcctgttgttgcaggaaggagtccgcaggcactgtcaggttttcggtatagatttcatggttgaaatcgatggagtcgctgaaaatcctgttcaggtcgtatgccacgtacttgccgcattgccagggagcggtggatacccacatccgttttttctcgggttggaaaatgacggagtgatgggcgatgaactggttgatggccatttcattggcaaggcccagttccgcttctcccactcctttccggttgcgcaggatagaggcggctttgggggcatctatcggtgcgttttctttcagcagttcctgcaagcgggcaaagcggtaggggctgtccgaagtttctatgttttccaggttccgtttgtcatggccgaaggtttccgactggtagtggttggtacagatgatctgctgcccgtttcctgtgaataaggctattttctccggcgatttctcgataattgcggctctgccgtccttggccgaacccaccagtatggactccgagacaaatgttttccgtttccgggcgatagcgtatgcttcctcaatggtagaagcatattgcaatatttccctggtcagaatggaaataggggtggcggatgcggcaggcagatccgatttggcggcattgatggtgacagtcagccccgtttcattcatgccggaaaggacaccggtcattccggcccatcccacggatgcgaagcgatatccgttttcgggttggtaaaacgaaacgagcttgttgcgtgcaaaggcgtcacccatgtagaaatcgaaattacggccgatgataagggaagaatcggcactgttctcaccccagcaggcaaatgaactgcatcctaccagcatatagtcctgcatggcatgtcccaagtcgtgggcggagtggtaattcaactgacgctcgtagggggtgccgatgaaatcatactcatgggtgcaggagagggagatgccataaatctcgtcccggtactcttccggcacatttttccccagattccggttgaaaaggacaatgaagaaacggaggaatttaagataactttcagaggggactatctcttttatctgatccacaaatactttttcctgaaaataaagtaagtcggaagtcagttggccgatggctttgcctctttcgtaggcaggtccgctgactttcagttcccaaagtccgctctcactgtgccgcaggtagtttccgccatactgccggaggctgtctttccgtatcacacgatccgtttcaggggtagacgcaaattgcggagtcatcatatcggcagatagatagagataactcatgcctatcatgatcgccgctatcagaatcaacagggccatccccccgtactttattgttttcttccaaatcttatgcattgcctactttttttgctaaatattcctgacctacaaattccgaacaagtgagcatggctgtcagcgtcacgcccaaagcgccgtgtacattcagattctgccccgtgaggaacagattcttcagtttggtgcgtgtggaaacaaaactgatttgcggatactggtagtttttgacaatgccgtatgccgaaccgtctatggttccggtatagtcccgatagctcagcggagtcgtggtatggatcttttcaatgcaatgattccagtgaaatccgaaccgcctcaggaactgcaagatctgttccgtcttttcttctttgaactggcggtatgcctcgccacggtgttcgggggtcgtatccgtccatttgctgacctcatccatatacatgggggtcagtatggaaaccacctctgtgaatttgctgttgccgcggggtacttgcatggagatcatgcaactgggggtattccctttgtgcatctctttttcataccatacatcctcattgccgtgcaggtatatattatggttctgataggggcaacagtcttttttcatcatcagattcagcgtgaatatcccgtaactgttttccagtgacttgatgcgagacacaaaagccggtttgatggaatggttcttatccagcagggataaggtgagttgcggatgcaggttggatatgacgtaagtactttccagtatctcttcatggttcacttccactccttgtatggcttcatccttgacaaggatacgggtcacttctttccggttcagcaccgtaccgccgttggcacgtatgatatggattaattccagactgacttgcatacttccttccgtgaaacgataggcgctctccagataagagttgttaatcatggcgtgttcatagaaggtagatttatttttgatcccgccatagagcagggaggttgcggcaagtacattctgtaaatccctgttcgtggtaacggatgctatcatcccggctgctgaggtggcaaagaaatccatgccttcttgggacaggcggccttttttcaggtggtctgtgctgatcaggtttcccaccgatcggatagctgccacataccgttttaagttctcccgttcatgggggaatgagtggcacagggtttccatgaaccgttcatgccccatggcgtaatcatagatagcgtctttataataaatccggtcgaacacttcttcatccatccgtttgatggataacttgtccatgataccgaaataacggaaatactgattcatgatttgtccttcatccagactgccgatatagtgaatgccggtatccatccggtgcccgccgcgttgataagtctggaagcagccgccaaacagttcattcttctccagcacacagacgtggtagccctctttgctcaagatggctccgcattccagaccgcccagtccgctgcctatgatgatgatatcgtacttactcatgttccggtttgtttttttggaagatataaatcgtattcgaggtatatctgtcattaggtaaaatctccagctgcatcccaccttcttgcgcgatgctccttatttgcgcttcggatgtgaaacaaagttgttctgtcgtcttgttgaaactgaaaatgccggtagacagcagttccgtgaaacgggtgaggcggtgtttccgggtgttggcggcattgccgtcccgcacaatcagctttccttccgggcgcaactgctccatgcatctgagcaataaggtccgctggtgctcatagttcatataatgcaggatatcattcagtatgaatgcgtcactttccggcaaagggtattccaatgcattggcgtatacaaattgcaggtggggagtgcggagccaaccctgttgcgctactgctatcttgtcctcatcataatcaatccctgtaatctcccgttcctcggaaagttgggaaagcatatagcaaagcggtccgaatccgcagccgatatctgtaatctgtcctttgacaggaaccagttggttgaataacctgtagttatcttccattttcaccttgatgcgtatgtaccattcctctaccggtcctttatagatatagttctgtaccagattttcgtagaagacgggattgtccgttgtgctttgttcccgacagatacgggcatattcttttttcatccgcgcggagatgtttttggtacgttcctgataagtggttccgtacgtagcatcgttggctgggatacgcggtagaatctctgtcagcatgatgcctttccgtacattgaacggctgtgccttggctatgatcttgcagttgccgtaaaggatgaccggaataatatccagttgcagtttttccgacagatagaaagctcctttatggaaacgcttcatccgtccgtcgtaggtacgtgttccttcggggaaaatggcgatggaatatccttctttcaccttttggcgcatccgttccacgtaaagctcgtaaccgtctcctacgtaatagaaatcggcatagcggataatggctccgaagaaaggagagtgccatacccagtgattggtaaccatgaccagtttgggagtcagtgccaataataccagtatatcgatgaaagactgatgattggctatcaggatggcaggctttttaaacgtttctcctgtccggtttatcctttctttatgtacaaatgtggctatatggatcaggcttttgcaggtgacatgtatcagttggcaaagtacttgtttcttataggctttgcggataggaagcaaggtcatgacagctatcagcaagcgcaggaacaggcatccgataaagaacagcaggaacaggccgccggttcttgccagtcctgtcaatgtataaggaggcaaccctttggaagcgggtgctgtgatgaagaaccggaaaagaatgggttgcagcgtgtaggctaccagtacgacggcaatcattcccaaaatggagatgagggaaatggactgcaatgccggatggcgtgcgaagaccaacgtacccatacctatcacggtggtgaaagcggagaagaagatggctgttttgtgcgagttcagcaactgccgtcctgtgcggtacttattctgcaatccgtccataatgaagatgctgaaatcatccccgattccaaaaataaaggtggacagaatgatgttgatgatattgaattcaatacccagcatgcccattaaccccacaatgataatccagctgaccagcatcggcaggaaactcatcagagtcagttctatgcgtccgtaggagatccataaggcaaagaaaatcagaaaagaggagatataaagaatcagatagaaatcctgattgacggctgatacccattggctggcgaaatagccgcggtcgaagataaccaccttctcttttggttggaaaagggggtacaccgcttccttgtcggtttcgttcatccgtacctgagtaatcagcatggtcagggaatcggcggaagtctgccattcgttcagaagccgggtagtgatttcattctggtagtccaaaggctggaacggacggtcgagccattggaaaaacggctcgaatgcatgttcacgaaaatgataacgggcagcctctgtccggatggtttcgcgtaaccgggctttcttttccggagtccagtagttgtgccattgtttcaaccgtgcttcctgcacctcttccggtatcagaaactgtccggcagaggcgtaatcttttatttttccttcttctttcagttgggcgagcagccggttcgtttcggcgtattgtccggtagcgtctcccatatctttgcctgtactgacaaagagaacagtcttttctttcttgtcaaagagttcggccagcttgttttccgattgtttcaagtgggcaggctcatagttcagactcatcatatcctcgttgaaacgcacgttctgcgaggtgaataaacatattatggtcagcacgagaatgccccctaccaagcctttgttcttttcgtatggataagcgttcagtttctcgataaagcgtagcaccgccccttgttttacatgcgcctgccctttcaggaaatgcggcagatagaccaggcaaaacagcgtggttcctatcaaggcaagcgaggcgaacagaccgaaatcccgtaacaggttggaactggtaaagaggaggctgaaaaaggcgccgatggtagtaaaactgcctacggtaagcggataggcgatttctttgattaattgttgtaccgatgatacatgattctgatgcgccagcatgtgtatggagtagctcaaggcaatgcccattacggcggagcccgcacctacggcaatggctgaaatgccgcctttgataaagtagatgaggcataaggcgaataaagctccgaacagcaccggggtgatgataagcggaatggatttcttatgcttgaataccagagatatgaagacaatgatgataatcagcgcgatggaagaagtgaccagcgtatctttctttatctgtcgtgcattgtacactcctacggaaggacctccgaaatattcggcaaccaattggggatgttccttttccgctttttgcagctcattttcaatcagccggatgagtttgtcatttttgcccgtgcttccggtgttgaataccggggtgatgaacatcagcagggtggaaccgtcccgtgagaagatatgttcattaatcagttcgtaattagcttccaactggaagtcttgcagatgtttcagcgtctggctgcccagtcccaacgggtcccgcataatgtagttcttcaaggcgaatcctgccggagatatcaggttggaatagttcttctgcatcagggcggcaatgtttccggcggtaagcaaggtgtccagccgttggtaggcctcgtcggaaaggaacaggggcaggttgtcgtaaacaaaatctccgacactgttgatcaggttttcgtcggcttttgagaagatctctttaatcagggttccttccgcttgttgctgtaaatcctgtttaatggtttcggcagcttcaatcagggaatccgcatccgccacaccgtccttgccggacagcatgatcataattttatcctttatcttcagattttcaaatacgttgatggcattttgggagtccttggtatccggaaagaaactggttacgttttcctcgaatctgacttgggcggcaaaaagggccataaagaggatgcatacgctgagggacaggtaaaacaagactttatgcctttcaaaatagttatataatccaacaaagaatttagtcatatccgttttttctcctacatatagccagcaacacggtggagattactccagacagcagactgcaagccattgcaaagataatgcttcctattaaatattgctctaaaactgatttgacattttcaagagaaaggtctccgagatgcaaatcgggaggattacccagtaccatgcagcctgtccggtaactgccgtacagcaataggggaatcatgggtggaatactgatattggcggcgacaagggcaatcactttattcagtctgaacagatgcgcaagaaagagggtgatcagcatctgataaccccataacggaacgatacccataaaaatccccagcatgatggcgagtacaatcttcaggttggattcccgtgtattcagcacatggtcggtgaagaatcgcttgcagttgctccatgacagtttgcggagcaggttacggggaacaatccaaaggcaggtaatcagcaccagcaccgtgttcagcacactgatacgggtaaaatcccggaacggccggaaatgggatacccgttctgcttgcgggggataatacacgtggatgggaatgttcttcaccgctacatctccccatgcggcaaagacgatagcttccaactcaaattcgtatttggcggtgtaccagcagctttgcacattcattttgcgcagagggtaaaggcggtatcccgattgtgtatcttccagtttcagcccggtttccagtctgaaccagaaattagagaatttattggcaaaggtattcttgcccggcatattgtcggaggctaagtttcgggcgcctaccagcagcgtgtcgggctctttttcaatggcttcgataaaacagggaatatcggaagcgaaatgctgtccgtccgaatcgatggtgatggcatagcggaaaccttctttttttgcttgggaaagaccgtgctttaaagcggttccttttcctttattgacaggatgggtaatggtgcggatagccggatattgttccagaatgttggccgtatcatccgtagagccgtcattgacgacaatgatatcgtctgcatacctgcatacctcctcaatgactgccgccagtgtcttcccgttgttgtaggtgggaataacgacgacaatctccagttcctttagtttcttccgccaaaccgatgttgtgtttgtactcatcttgtttttcagtcaaactattcagatacgtttgggatgaatgttttcgtacctgaacttatgtggtttctaatgggtgacaaagatagtatattttcggatgcgggcattctggcgttaattatttatttggagatgcatttttaattttaaagcaggtaaacaccaacttgttctcgtcgaattgcggattttccagattgttctcggatatatacagtccttcccttcccacaaaactctttttatagaaatatttctttccggggaattttgtttctccgatgatttcaaaatccgcgttcagtacaatgacggagaactcctttcctttgggttcgtcataggggctttcgttggaagccagtttgtaaggcatttcagcaaaacggtagtacacattgcggtatttgtcatacatgatatgccaatatctaggattttcattgagttttataatagcattaatgccttccatagaattacccagtttgggcttcatgcttttcagatatctgcttttggcgttataccatcggatatgtttcaagtcatctgtaaccatcaggctgtcatatccgaaaaatccacagaccaaacggctctctttgtagttgtaatcataactaaaaccgtatcctcctgcgatattgtcatattcctctttaaagatgggtggatagaaaataggaatccatttaacttctcctgttctcagatcctgtgaggcgaacatatgggttctaggccagtcttcctttttcatatcgggttttaaaatttcttggcgtagaaatatgcatgagtctttgataaaagcaggtgcattgtagtaactgccaaaagacaagggtgtaaatctgccttcaggagtttggaaattatagtttcgtattatttccccttgagagtttatggaactgagccgactgatattattctgtgcaactaatatatattgagaatcgggggaaggtctactgccgaatacagctggtagcccgttgggacctgtcttgtgaagaggtatccgtttggctatctgttgattctctatatcaaaaatgacaatgtcatataatgatttttgtgtattctcaaagtgaaggtattctttcccgttttcttcgaattggaacatggatttgcttaagtaataggtctgttcgtctaaagggaaagccagctgtttttctgctaccagttctacttcgttctgtttgccagcttcgttttttggggaggactggcaagatacgaggataaatatagaaaagagtgatataaaaaggagtgttcgattcataatattttcggttttatgatgtatgtaatttatgtgaccggatttctaaccggccacataaattgttggttgttaattggtaggagcaccatgattcccaccttctcctgaaccttcaccgggggcacctacctctactccggtgccgcatttaccatcttcactgatacacacagtgcctgtagcagccattttgcaattttcccattcagcttcgaaagcacagtactttggaccccctcgtggcatttgcacggcaggtgctccaaacactacttcctcattagaagagtggaggttcaagcttattgcaaatgttgcaataacagccataatcattgtgaattttgttttcataggtgtcatatttataattgtctgaatataagatgtttaatgggtgttgacaactataaatggacttattgttcttgctattatggatatttaacagaaggacttgcttcattgatacttacttgccatcagtaccgctttcaacttgataaattcttttccattacaaatgccttctgcctgcaacttgaaaagatgctcttccgttttttctaatcggataaacagctgtagtagcggagtttccagcgggttgatggcagacaggaatttggaagaagcaatctgtacatactgcaaaggttggttggcgatctgttcggcactttcttttattatctgtaaggtacagacgcccggaaccaccggctgtccggggaaatgaccttgatagagcacatggccgggattcagctctatctctattgcctgttttccgtcttctctttcctttatatgaatgattttataaaagttctccagcagcatttcaagggttgtttatgttcagtttgtccaattggattcttaaccgtatcagcggatgcttgatttgtactttctccgcctgtccgtttacaaagccggacaaggtgaataccgtctttccaaatcctttgccactgattctttgctcaaaagtactacttttctttttaatacgtgctttttcactctttagaaatagatttttgaaatcagtttccagtattttcagcatctttttcttcctcatcggttcaatgcaactgtttactatgaaggtgtcgcagtgcagggagaagtcaaaaaggctgaggccaaagtaagtggatcccaggatacggatttcgttatcaggcatttggcggacaatgagcattccgctgaaatgatgtttcatgaaatccagttgcaagttgtacttttgcgactgtgcttctgcctgcaggatgggaggcagtgccgtagcttcccctgtcacccggtgtgagcaggagagcaggataaacagcaacagcagccagctagcgtatcgtaaactttgcctcatctttcaaagaattgaatttcttgtccgagaattcgtattcggtatagttggttgcggtttccgataaacgtagtttgtggacagacatgtcttttttgtctaaataaatttgaatctggttgatatatgcctgtatcgctttgctgacgggcttgatttgaatgagatagtaatgggcgtcttcaaaatattccaaagcatagccgggcgacatgttggacaggtcgcccaccatgcaggcggtaagcatatcctgcatttggttcatcatcttattggagtgaaggtccatgatgcttttctttccgtccgatactattttcagttggttgttgttgatcacgataaggtagttcatgggctgtgcgtagtccatgcatatcttattgctctttttataatagaactttcctttcgaggttattttctcatcgaatacatccagatattttatctgagtgaaattactttcgatggactctatatttttagcctcttgcagcagacgggcttcaaaatctttcagatcagtaagtttcttcatctgttgggcttgcatcggcaggactgtacagaacatcaagagcaaaagtattttcatgtaggtcatactttatagaggtttatccgtttgtaatgggaagcaaagatagtatattttgagaaaccattcatacctttatcgcttatttacgatttttacctgtttctacaatcgttcacatgggcaattataatgaataaaaaagttatatttctgcgttgcaatatttttttgttttatcacggcatgttattgttaatcaataatttatagtgacgaatcctcctgtatccccctcgaaacggtttatccgttttccctgtcggagtcagtttggcagaaagcgtcattatgcaggatgaaggtctgttggaattcttgtaaggagaacggtaggatatgattttcacttaggtgaagatgggttttcacctgtgtgaagagctgttgtcaccagtgtgaaaccaccgtttcaaactggtgaagcaacagtatatatcggaagtttacacactgacatcctattaagttgaacgaaagtacagcatatcctgtcagatttaatctgatatctgcgcttctcttgcaaataacgggtgaatgttccactccatcgcttacataccggtttgggggtattacagacttttttacacggcaagttgttggtaatgagtggaatgaagtggcggaagaattttatgttttacgtaagacgaagttatctttttatcggtttgatcatgaagggtgaaccaggtctcgtttctggaacttggtgatgttgctgttgaaaatatagaagaaatttattttgtcatgtcctttatcagcctatctaacgctactaccgtatacccctctttttctataaagtccagaacttgtaccagcagcctgtcactatcgggcatccggtcatgtagcagaaggatggagcccggaacgagccgtttcttgatgtgtttgataattttttcaggagtgggttgctgagtgtccagtgtgcggatgttccaaccaatggggatgtatcccagcctgcgcactgctttagccagggtaggattggtcactccgaaaggcggccggaaccatcggaccggttggccggtcactttttccaattcttgctggcaggtaattaaatcatggcacatccgtttgaaggtatagagaggaaaatagccggaatgggagaaggaatgattcccgatacgatgtccttctttgatgatttgccggagcagttcttcattgccttttatcttgtttccgatgcaaaaaaagcaggccggtatgtgtttttctcttaacactttcagcactttgggggtctgtatcggatcgggcccgtcatcaaaagtgatggctatgattttctcttcggttttcttgcaacagaagacacgcatgtaaatacaggcacggatgctgtaagaagcgtaaaagaaataggccatgacgcttactatgatgactacagaaactaggatgtgcattgcttgattaagatgattgagtgatactttaacgtgagttcgaaataagaataaatatatttcacttataattagaaacatagcgataaaagtattaaatttatagtgctgaattataacatttaaacgattaccactatgtttccagagtctaaagttacagagatttattgtatggccgatgatttttgcaaggaatttacattgcaacaggaaaaatatatgattaaggatatgaagaccatgcatcgtaacaaacccaaccgtatgagtgatgcagagattatggttattctaatcctgtttcactccggtggtttccgttgtttcaagcattactacaaggagtatgtctgtaaacatctgaaacacctttttcctcgtcaggtttcttataaccgttttgtggaactggagaaggaagtattgcttcccatgaccatattcatcaaaagagtactgctgggaacttgtaccggcatcagtttcgttgattccactcccttatgtgtatgtcgtaaccaaagaatcttgattcataagacatttgaagggcttgccgagcgtggaagatgttctatgggatggttcttcggattcaagctgcatctgataatcaatgacaagggtgaaatcctcaatttcatgttcacgcctggaaacgtggatgaccgggaaccgttgaaacagggtaggtttctggaaaacatcaaaggaaaactatgtgcagacaagggatatataggtcaggctctgtttgaaaaccttttccttaatggcatacaacttgttactaaagttaaaaataatatgaggaactcactgatgagtattgccgacaagattttgctaagaaaaagagccttgattgaaacggtcaatgacgaactgaagaacatcgcacagattgaacactcaagacatcgttcattcagtaactttatagccaactccttgtcggctatcgcggcatactgcttttttgaaaagaagcccgccattgacgtaaagtttgtcaatgacggacaacttgctattttttgattttatttcgaactcacgttactttaataaatgatcttgtagagattattctaattgtttgtcattatctgtcagtattctgaactttttttcggtatcaatcgtattcaagtgtgctaattgctctttggccatctgccgaagatgagtaaaccttttagacttgtccaccttacgcttgattaactctgcattgaaggattccatattcgataatacgactaattcatttatgcttgctacatctctgatattgatattcttatctgcgtattgtggatttgcttcacgccattgtcttgcggtacatccccataatgcgagatttaacaaatcagcttcatcggcataaacaagtttttgattgaaatcttctactttaggtataataaagtctttgattgcatccgtatgtatggaataatttactttactaagtattctttttacgttccattcacttaataaagggtgtgattctgcttctttaagtctttggtattctttgatgagatatagtttaaattcagggctgagccaagtcccgaattcaaaagctatgtctttatgggcaaaagttcccccatatcgcccgggcttggatataatccctattgctttagttttttctatccattgtttgggggttagggtgaaactgtttgttccactctccattttaaaagcatcgaattcgatgcctttaaaatttggattatttagtttttcccataaccctagaaaatcaatcgtactacgtagacgcatccagttttgtataatgtagttagtacgttctctgtctttgaaatgtgccatgtctgtcaggcagatataatcattattatcaggtcttacagatatggatatatcaatattcgtaacagttattctcttcattatttctactacttttattttatgagggataaagttaagcattattcctgttttcagtatcttaaaagcatctttttaataggccatgacgcttactatgatgactacagaaactaggatgtgcatcgcttgattaagatgattgagtgattgataccttgatattggttataaatcaatgcgtaacgggatgaagcttcttctttcaaggcttttgccgccatccagagagcataggatgaagcagtctgatattctccgcattgttctttaaagttgctatgcagggcatgagggaacagactgtgttccagatccgtataaacggcatctgttgcttcctgcccgttcttgccactgataaaccagtcaatgtcttcgggtgcaagcccgtgagattttagaaaatgatgcatcctgttactgatttccggagcactcatccgggtgataaaagtatctacccctttcagttcggcaaaagtctgttcctctttttgtgcgcttaacaggaaaaattgtgctccctcaccggctgtcgttcctttcaacagtcctaaacgctgctgaatgatatggctggtaggggttatttcatccatagcacctgccagtacatgctgtttgccttcggcaatgcttatgatgccatctatcagagcactttcaaaacttaaaccacggtgtacatacgtaacattataagcatgtattttgagtagcaaagctagctgtgcacccaccgtattaaaggtggactgaatgaaagcggtgggattgagcatctgttcccggttgtccatcaaggcgttcataaacttttccgtatcggccagacaacccagtcctgtagcggtgataatggcatctaccttttccgacgggatatctttcagacattccagtccgcaggctactcccatcttgatcatgcggctcatgcgcctccgcagattggcgttggtgatcatttctttataatcaggttcctgtgcggagaaataaggcttttcatttctgctttccgcatggatagaggcgatacggttgatatatactgggcacatacgctattgggttagagtggaaaatacgagagatgagttgttgccgccgaatccgaaggagttggataatacatgccgtatgggaagtcccgaccggaaaaccgtttcaagaataaggccgctttcttcatcggacagatggaagttcagattagggtaaatcagtccgtgacggatggagagtacggaatatacggcttctattccttccgaggctcccagggtgtgcccgatgaaagccttgaccgaactgaaaggcggaatacgggtatcgaagatacgccggatggctttcccttcggaagcgtcgttgctgggagtgcctgtaccatgtacattgatatagtctatggctccggctgtcagcccggcagaggctatggcctgactcatggaaaggaaaggcccgtctccgtcgggggaacttcctgtctggtggtaggcttcattggcattggcgtaaccgctgagttcgcaataaggagctttagtaagggatttatcagattgaagaacaaggtatccggctccttctcccaggtttagtccggcacgtgtgcggtcgaaagggcggcagtgctctttgtccagtatcatcaatgaattgaaaccgttgagcgtgaaacggcataaggcatccgttccgcctacaaggacagcgtccagcagaccgtgccggatgaggcgtgcccctaacataatggcatttgcggcggaagaacaggcggtgctgagggtggtcaccgttcctttcactcccaaataagcggctatcatttcggtactggacccacagtcatgggagataatgtcacgtaatctccctttccggttatcttcccggaaagaggcataaaaccgctcgcttgcatccattcctccgatggaagtggaagaaatgagcccgatacggggagaagtgaaatcgagttccgcatcacgggccgcttcttgggctgcccacaagcccagcaaggctgtacgtgaatacgtcttgccggatggaagggacaggagtttctttaattcttcattgctctgttttacttcggacacgggtacgtcaagtgcggtggggaaaagggtgattttccccataccgtgttttccggcttttaaggaatccaggttttcttccactcctttccctatgcccgaaatcactcccagaccggtgacatagatcttcctcatttctgatgggcggtgatgtagtctgccagggtacgtaccgaatagaatatttccttgcctttggcaggattctctatcttgattccataattcctttccagaatcaggataatctctaatgcgtcaatcgagtcaaggcccagaccgtcatctccgaataaaggtgcttcactgtcaatgtcctccggagtgatttcttccagattcaatgcttctattaattcaactttcagtttatcaatcaattcttccatattctttattgtttttcaatcagtttaaatactgctttataggtgttcttccataattcacaccacccgatgatacaatagttcagtttccctttttgcatgactatacgtgcgtatctttccagtttttccggctgataggcttcagtgatgaaaaaggtgttttccccttgtatcttgtggcggatgcaaatctcgccggacactacattgggtagtgtgtaaacaaatacagccggactggctgcctggtctccttcccggtctatcagttgctggtgtctgatgtccgtatgcagagaggaagcggcattggcaagtaacatccccatttccagtggagcgaatgtcttaccttccagcaagtattcggcggccacatatcccaatttgcaaaggtcatccattttatagaatttcaggttgtttccgcctgtttttttataggtatcacgtataaatgtgccgaaatccggttcttcggaatgaaaaataagttcgttgtttatgaagacagaactgttttcaatacgaacctcccgtgtacatcggatttcgggcaaggtgttgtcctcatccttgaacggagtatattccggtaaagataagacaatggctgcgttgcatccgccgaatcccgaagcggtttttacgcaatgtttcatcgggatgctccggtgggtggcatagaccggtatcggcataggaactcccggtgtttcgtaacccggagtgccgaacaggatgccttgtttcagttcgtgcatacagacaatgctttcaatgattcccgatgctcccaaggtatggccgaaatagggcttcaaactatggacgggcacttgttccagatgagccagtgtgagggctttggattccatttcgtcattgtatacggtagctgtgccgtgagcattcacaaaactgatatcctgaggggctgttcctgcttcctgcatggcttggcggatggcgaaatagagtccgtctcccgtgcgggaaggaccggagatgtggttggcatcgttactgacggctcctcccgaaaggataacatgttcttctgttccttctgaactgagcaatacggctccgcaggcctctcccaagttcaatccgtcacggctgctgtcatacggacggcatgggcgggagctgagagaccggaaagacccgaaaccgctggtgatgaaatgagagagaaggtcacctcccgctacgattacccggcggtagataccgttctctatcatgcgttttcctgctatgagggctgacactcctgaaatgcaggcattggaaatgacatgcatccgttcctcggcatggaaataaccggcaatgttttctgccattttccaaagaaagaccgcttcatcgggatgttccgtatgacgggccagtaaatcgatgttccctttggtggtggagaggatgagtccgcaggttttgtcttccaaagtttgtccggactgacggatgagttcgttgatagtcagtatgaacagttgttccatccggggatagccacttactcctatggcttccgcttgttgttgcaatctatcttgcgagagagtggctgccaataggggagtgtccgcaatccgtttgtccgtctgcagggtgataccgctgtgatagctccggatggcttccagattttcctgtgtgccgaaacccagcgcgctgatcagggtatcatgggtgatataggtagtcagatgatgttccatttctttttccactctatgtaaaaggcaggattaaccagttccagttctctatttgtattcaggaatacctgtgtagtggttcctgttgccacaatgtattggtccgatgcccggtagatggtgtattcaaaaaggattttggcggcatcactgtggataaaccgtgtctcgacaatcgcttcctcgccaaaagacagcggttgtttgaactggcaggtcagatctacgataggaactacatatccttcccggtagatgctcatatagtccagaccgtaccgctttccgaaagcttcgcgtccgtcttcgaaataacgcacatattctccatgccatactatctgcatggaatctatctcactgaagcggactttgatggtggtccggtctgtcagtgccgcctgatgtggacttgtttttcgtttcattctttcttcagatatattttcatccggcattcggccagcaattcatcgttttcttttacctcggcggtaatcagggtgatatcaaatacttcctgaacgatggttataccggtatatagttctgctccggcagaaggaagacggaatagtttcatcttttctaccgaaccgataaaacctaatggtacaggttctttccgcagcatatagatataacctacacgtgccgctgccgactgggcgatgtgctctatgattcccgtttcctgtagtactccgtcccggcagaacaggttgtcggtagtgacggtcagccctgaccaggatgtatcttcttctatcccatagaagcggtctatcattaccatgggcgggcgttggggaatcagccggaacagctcttctccctgacagatgatttctttgctgctcatttcagtctgcattgcaggatactgtgtcccagtcctatgttatcttgaatttcttccacttccaatccggcattttcaatgcagcggatcaggtcatccgaatggaacatcttactgttgccgttggccattgctgtaaagtagaggctgatttgtgtcaggcaataagatgctgtttcataccgttggcgatcccataatgtttccataatatagactttgctgtctttgccgatggattgtgccacacgggtcaggatgctgatgacttcttctttcgagaagcagtccagaaactggctcatccatacagcgtcaaaacccgtgggaaagggcacgtcccgatccagcagattggcgccgtgaccgtgtatgcgttcggcaccgggcaaaccggccgtttgctttctcatcatttccagttgttgaggcaggtccacgatggttacttccacttccttattatattgtacgcattgtgtggcccatctgccggtattcccgccaatatcgagcaagcgtttcgggtgatggctgaacacgatttccaatgctttgccgaatgactggtccgaatagaaatgatcaaagctgaaccagcttttctgtacctgttccggcaattgggacagaccttcgtaaatggtaggccattctccgaatactttcaatccttccggacgcccgtttaaaagagcttcttccagatggaacaagccttgatagttcacatcgtggttgaattccatattgacacgagccattttatcgttcagcagaaaccagcctgccttggccagtacataacggtcttcttccaacaggatggttccgatggtcagcgatgcttccagtaatacttgtgccgcatagcgtgtcagtccggtccgcccgctgatttcttgcagcgtatatccttcccgtttgccggacaataattggaaaattccgaatttcaacatcaggcgcgatacttggaataccacaggaccgaaagctatctcttgtgccagtctttgcgcttcggcagccgtacattgttcttttgtatatcttttatgcatcataccagatttatttttatgtccagaacgggtagtaattgaaccattgttccggatactgccggacaatcttttccagcgtttgtgtatattgctccaataatgcctgttcggcccgtttctctttcgtccgtactactgtctcggctataaagaaatggaaacgatacgttctttgggcttcacgcatggcaaaatagaatacgacgggtacttttaacttcgaagccagcaggaaagggcccatcggaaatttggcttcttttcccatgaaagaagtcgtgagtaatttctctttattcagatagcggtctccctgaaagcagacatactcccggcggtccagcgcttccgtgatgcggaatacatgtgtcaggctgtcttcattcaccggaattattttgtagtctcgcgtagaggcgttcttttccaaaatctcctttatccgcttgtgttcggcatcaaacatgacgatattgatctttttgccatattcatcgaagaaaggagcgcctatttcccagttgcccacatgggcgccaatcataattactccggtgtttccgtttagtacgtctaaaaatgcctgatagttctcaaacttgaaatgatacttgccggtcattccgttgccgatggccactttgtcaatcaatatttgtcccagccggtaatagtttttcaggagcagtgcgacggatttcagccgtccgtatttcagcctgttccgtgcgtaactccaagtattgcccgttgctttcggtgcgaaaggtatgaagtagaggacgaccaatgccaggaagccgtaggccgcagttatccccagacagcggatcatgtagataaagaacatgtatccgaatgtgcctcctcttgtcttacctttccatgtttcggacatcagtcttctttttgcatatgtgaaattaccagattatagaaatcctggaaggttttgataccggcaaaatctttggctgtaacggtgaaaccgaaattcttgtcaatcagtactaccatatccaccaggtcaaggctatccaattccaaggtttgcatcaagggtgcgtccggttggatctgttctacatcaatctcaaattcttcggccagggtggttctgatcttttcgatgatttcttcgttggtcataaatttatatattggtttgaattaattgttttctttaaatttacggataatcagtgaggaattggttcctccgaatccgaatgagttggacaagaaggtgtcaaattccgtttctatcctccgggaggggatgttcagcagagcagaggcttcatcgggttcttcaaaattgagattaggagcgataaatccgttattcatcatcaagatggaataaatgacttcactggcgcctgccatccacatctcatgtccggtttgtgacttggtggatgtgacatagggtcgatggtttccgaacacttccgctatggcttttgcctcattcaaatctcccacgggggtggaagtggcgtgtgcattgatatattggatttcttccaagggaatgcccgcatcgttgattgccatctgtaaagagcgtctgggaccgtccacattcggtacggaaatatgatctccgttggatgaaaaaccgtatcctatgacttctgccagaatagtagctccgcgccttacggctgattcataactttcgagtaccaggctggcgcctcctccgctgggtaccaaaccgtcccgtcccttgtcaaaggggcgcgatgccttttccggttcgtcctcacgggtggagaacgcgcccaatccgtcgaaactacccacggagtaaggatttacctcttgtgcccctccgcacagaatgcaatcctgaagtcctgatttaataagaagatacgccatgccgatggcgtgtgaaccgctggcacaagctcccgatatggtaaaattaattcccttcaaatggaaaataaccgaaaggttcatggtaatcgtagagttcatggactggaagatagaaccggagcccaccatagccgtattcttcttggcacgaatgacatcaatggcctcgattaccggagcggcgctactgtcatttccatacaatatgcctacttcatgatccaataaaaactcctcgtctatttgtgcctgacggaatgcctccaaggtagccatataggcatattctccctgttcggcgaggctatgtctctttttgcggtccaataacttctttaaatcaggacgttcgacaagtcctgtcaatgcggaaaaataccccatctctttacgtgccggatcgatgccgatgccggaacgcccttggaacaaagagtctttcacctcatcttggttcttgcctatgcacgaataaatacccatgcctgtaatcactactcttctcatcttctgcttatgtatagattcctccattgatggaaattacttctccggtgatataggaggcttgttccgatgccaggaagcctaccagtgcggctacttctccgggttcgccgaaccgtcctgccggtatctgttttttccattcattttcatcaatgccgttggtcatatccgtgcggataaatcccggtgctacggcgttcaccgtcacgtgttttctggccacttcctgtgccagtgctttggtggcggctatcattccgcctttggctgccgaatagttggtttgtcccggcattcctttgatacccgacagggaaacgatgttgatgatacgtccgaatcgctttaccagcatatttttcagcaagggttgggtgacgttgaagaaaccgttcaggctgatatccaacacccggctccattcatcctgttccatccacagcatcaggttgtcacggcgtataccggcattgttcaccagtacctcaatgtaggtatcgggatgcttctccatccagccgttcagtgcggcgtgtgtggctactgcgtctgtcacgtcaaatttcatcagttcgccgtccgagccttgttcccgtatctgttgcagggtggcttcggcttccgtatcgttgctttggtagtttatcagtatatgatatcccatttcggccagtttcagacatacagcccgtccgataccccggcttcctcctgttactaatgcgtatttcatttttcttgaaacctcccttttttaagatataccatcattctttctatctctttatatttaggcgtatcttcccggaacacaggaaaaaatgctcgtatctctttatatacttgttgtgaccgggggcttagccgatcggctatttccaaacagtctacagcttgtacaatacccatcatcaggatagccatcacctgataagcattttctatgactgtttttgccagcagtgcggaattggttcccatgcttacaatatcctgattgtcattgttgttggggatgctatgtacatacatcggattggacaaagtctggcactccgctgtggtagaagtcgcggtaaattgtgacgcctgcaaaccatagttcaatcccagcactcccatattgacaaaggggggcagaatgccgttgatgcggtcgtgaaacaagtaattgatctgccgttcggcaagcatggccagtttggtgaccgctattttcagtttatccatttcaaaagaaacgtaatctccgtgaaaattaccgccatgatacacgttttgcgtgtcggggtccactatcgggttgtcacaggctgaatttatttcgtttatcaatactttttcggcattgagcaattcatcataaaccggtcctagaatctgtgggatgcagcgcaacgaataatagggttgaaccttatgggtgaagattttctcttcgtgttttccgttgtaaagttcattctctcttttgcgtacacattggctgccttccacccattggcgcatcatgcgggctatctcttgctgtccttcatgccgtttggcttcgttcagcggttcagacatgaaatcatcgtacgaggcggcaatttcattcatcatgaccgatgcgcctactgcccaatgcatcagttggcgggcataaatcaggttgacaatgcctatacctgtcattaccgaagtgccgttggtcactgaaagcccttcgcggatatgcattttgaagggttgcaatccgttttccgccaaaacggatgccgtatctcttttcttgccttggtaaaagacctctccttctccaatcagggtgagggcgatatgggcaagctgtaccaaatcgccactggcccctacactgccgtgttcgggtacgtatggagtaatcccccggttgataaactcggtaatgagcaatgccagttctttatgtatgccggattttccttgcagaaaagtatagagacgcgctatcatggcagctttgacatagagttccggaagggggtgccctgctccggtggcatggctgcggatgatattatactgtaattgtgacaaggattcatcttcaatacggtattgggccatcggtccaaagccggtattgatgccatagatgatcttgtcgttggagaatgttttcagaaaatggaaactctcttccaatttttgcatacattggtcggagagtgtcagtggctcttcttcaaacaaaatcttatacagggacgctaaagttatcttattctcagctagcattggattggtgtgataagcagttttgtataatttccgcaaaaatagttatttaaaaataagtattaccatccgaagggagatttttcagttttgatggttatctgaaaggttcaccacagattatacaaataaacgcagatgcttcttaaatcattgattgtcaggtgggtaatctgtgtgaatctgtatagtctgtggtgaaaaatatagtgtcgctctatgtatcctatttattcagtttccatgtgaaaccgtctttggtatctttcacttcaaagccaagagcggccagctcatcacggattttatcgcttgtagcccagtctttattggctttggctttcatacgttgttccagcagcatatctactactttgccgtatgcctcttcacgtgcctcgttattggcggcttcttctttcagacccaggatttcgtacataaagagatggaacatacttttcagttcttccagatcttctgcggaaatagtggctttcttgtccagaaccgtattaatcatacgggcgccgtcaaacagatgggcaatgacaatcggtgagttcaagtcatcattcatggctgtataacacttttcacgcaagtcttttaccccctctatgccggtggtttgtgttgccggagtgatgcgttcaagacctttcacagcttctgtcagccgttccaatcctttttcggctgcttgtaatgcttcgttactgaagtccactgtactgcggtaatgtgcctgaaggatgaagaaacggatggtcatggggctgtaggcttgggtcagtaacttgtgggtaccgtggaagaactcatccaagttaatgaagttgccgtatgattttcccatcttctgtccattaatggtaatcatgttgttgtgcatccaatagtgaaccatgtcatctccttgtgaagccacgctttgtgcgatttcacattcgtggtgtgggaaaattaagtccattccccctccatgaatatcgaaatgctcgcccaggtatttcttacccattgcggtacattcacaatgccaaccggggaatccgttactccacgggctgggccagcgcatgatatgttcgggttgtgcacatttccacagggcgaaatcggcaggattgcgcttctcgctttgaccgtccagctcgcgggtggtgttcagcacatcgtccaggttgcggccggacagtttgccgtaatgatggtctttgttgtattttgctacatcgaaataaacggaaccttcactttcataagcatagccgtttttcagaatttcttctaccagttctatctgttcaatgatatggcctgatgcatgtggctcgatactgggtggaagtacattcaaggcttccattgccttgtggtagcgattgaggtaatattgcactacttccatgggttccagttgctccagacgggcctttttggcgattttatcttcgccttcgtctgcatcgtgttccagatgaccgacatcggtaatgttacggacataacgtaccttgtatcccagatgggtaagataacggaacaggatatcgaacgtgatggcggggcgtgcgtgtcctaaatgggcatcgccatatacggtaggaccgcatacatacatacctacatgaggggcatgcaagggaacgaaaagttccttttgacggcttaatgtattgtaaatggttagtttattttccataattcattctattagaattgcaaagttataaattaaagtgtgtatttggctaataattaacaaaaaatctgatgctgatgtcctctgcttgtctacaaatggtgtttgttggtttaaaggatagagatttatggtaataaataaaagtaggttgtctttgaatgtaaaagaacagaatgatgattttttgtatggagattagggaacctaactctttttccttttcatgaaataggtttctcttgtttctgtttatgctctttaatctctgctattgatttgtaaaacaggaccactgcctcataaaccttggtgttgttttacggggcagtggtggtgtttctatatgaagtttgcgtgcggagcgggaatgtttatttggacttctttccccaatacgtcttgttgttggcatagccggcatagacgatggtatgggtgcgcggactggcttcccagtcggtttcgcgttgcagataaagttccactccgttgacagtcagaatctgttgggcggcatcatagctccacgtactgcctttccaggtaccttcggtgatagtgtggtcggcggcgagagtcattgttgctgaagttctctgctctccatatttgtatgtaaggtcgatgtgttcccaattgccgggcaattcttcttcggtgatggctaccttgggaacggctccgtagcgttcaggcattacgagaggccaaccgtctttcgtccagcggatgctgcgtacgtgccccatcatgatggcgttgctggcgttgatgcccggaacatccttaggcagacggccttgtgaggcgtagaaccagttgtctttgccatcgtcgaagatagcgcagtgggcgatgcctacccagccgtagcctttgctgaacttatagggatgagtcactatgggcagtgcatcggcaccggcggtcacgtctttgccgtcaatgcccacgtagggaccggtgatgcttttcgagcggaccacacgggtgttatagggcacgtcgagagcgtcgtaggccaggaagaggtagtagtagccatcgcggtaaatgacttcgggaccttcactggcttgccagcggttacctgtctggcgggtggcgatcaactgaccatactcggcaggtgcttggcctgtagcccaaggttggcccaaactttcggcaggcttgcctgtttcgctattgagcttgagagcggctatgccgctatgccatgaaccgtagaccaaccagtgctcgccttcgggcgtgatgacataagaggggtcgatggcattccatttataatagcaattggcccaatcatccggcttcacgttgaagttaagtcctttgtcggaagcattggtgatgacgtagcctttgtctacccatccgtcgttgttggagggatcgttgttttccatcaggccgataaaggcgcgctccgaccaggtgttggcaccgttgagtgtgccggggcagacaatggaatagtacatgcgatagaggccgttctttaccttgcgtactacgggagcccaatagccgaagtcattaacattaggattgatttcggcaagtcccatttcttttcgtatttcattgagcttgggcactacccattcgggcaggttcttcattgtaccgccgaggtattcccagttgacaaggtccttggagcgacgaccgtggaagtggccgcctgcggtgtggacgttgccgtatgaagcatccgtctgatacatgtaataataaccatcttcggccaatacaaccgaggggtcgtgtacgttggcaagattccattgagagcgtttgctccagtcacttatcgaggtatagtcatcggagtaggtgggggccacgtaattcttgagttcatcgtctaagcttaagctttctgtggtggccgtgaccacctctgaatagacataacggctgtcacagtagacgtatgcacggatatagtaggaggtaccggaggtcaaggttgagagggaagcactgaaattctcatcggcatccaccacgtggtctttgatagtcggtacggaagctgctgcactgtaacagaagcctttcttgactatttggttcagatcacctgtaaccgatgcggtgacggtcaacgaggtgggtgtggttgtagttactttcggagtacttacagttgcataatagcggtctatatcttcgctgttgtcagaacaagcggctaaaacaaggaatattggtaagaacatccacaatggtaatagttttttcatctgttgatagtttaaagaccatgccgcttcttcctgaggaaaacggcatggcttgtgtgattactgattcggattagaagacgagatggccgccttcaatcgttaaagcgaagttcaagtcgttcatatccaatttgttgatccctaaatagtattgggcataggaagtacctgaagtgcctttcattactgcttgaatgtcggctgtaccattgccgcaattggtcacgtagacggtgactttggctccgttcatatcggcaagccaagcagcccagtcgccttgtgtaccgttgtgaacgaggctggcatttccatcgtatcctgcaccccatccatagttgtcggcgcgtaccactgcatattcggcaagatcggctttgcggagaacgatagcgaagttgctccagttattagcttggctggtgtaattggtgaagctgatggatctggtttcacctgccggcacgttgaaattgtcagaaaagacagtccaccaacccgttgaattgtcttcggctcctatgataccggctgagttgctcacagcggcaaccacagattcggcaactttgacttctacggtagcggtaacttcgtcggcagtaatggttacggtctgcgtaccggctttggcaggaatggcagagaaatggagtttggcgttgtctactactcttgtgcttccgtcggcataagtagccgttacttccaatccttcgggaaggaatgccagcgtacggtcggtcatcgtttccgttgctgccgaagtataatagtaatactgcgtgtgcgcaggttgagccgtcacttggatggatacaatcttttccactacttcaaacgtagcattggccaccaccggctggttgcaattctcgcccttgaaggtcttgttgtagatgactaccagtgtcttcgtgcccagttcgttcatattggggatggcagtgaactggagttcttctgcggttacggtcttagtcaccccttcttcgaagctgacgatggcagtaatcccggccacggcttcttcgagtgaggtgccggcattgacctgatcgggtacattttgcagtaccatcgagagcggattcttgtcttcggcagaggtaaggccgccgataggaacgatgttcgattgcaagaagttgatgtaagagccttcgggtactaggaagcagcggatgttggtattgctcgcgtctgcattcagattgggtaacttgtacggctgtttgtaggttttggttgccgaggcgttctggattttgatagagaaggcattttcattggtgcggtctacggtgagtgttactttgccgcccaatttctgtacagcttcgtccagattgtcaacgggtgacagcatcagcgtgctggatgtgtatttgaagaagagatgggaaccccattgggagttataggccaaagtatcgtttgtggtatcaaaacgataagcgccatattccgtgtatccttcacctccgcggtctgcgtcattggtaatgactagggcgaagtttttataataggtattgtcggcagggttgatgttgaggttgaacactccatgccacttctgaccatcgggcacgacgtaatacttggagaaagctgtccagaaaccggaggtgtagtccgtattaccgaaggagtagacatcttcctgcatgccctccagcacttcttcttccggatctttctttgaatttgctatggagtccactttctcggaaatccagtcaggggcgttaacatcatacagctcgccaccctcgcagcttggcaatgccatcaacccgaaggcgatggaacagcaagcgtatactaatttattgagtattctcattgtcttacattttaataggtttgtttatttgcttaagtcaaccaccggatgaacagtccatccgttctcactgaaataagtagagttgtccgtgctaaagttggcagagttaccacttaggttagggttcttgttcaacaactgttgtacgatgggcagaaattcgtgcccgggtaagtaggtgtcaaaagaactttttagttcggagtcggttgcgatatcattgtagtctacaggatctttggttccggttacagaacggcgtacgacactgtgctccttaagttgttgcaaacgatcattcttatagaagaatccccagcggataagatcgaatccgcgtccgaactcacaaccaaattctttcggacgctccacattggcaatctgctcgaagagtttgtcggctgtagggaagtcagccagttccagatcgggcaagtcagcgcggttgcgtacttcgttaatccagtcgatggcctgttgtgtggggccgttgacttcgttttcacattcggcagcacggagcagcacgtcggagtagcgcatcagacgcaagttgattccatcgtgtaaacctgtaataacggtgctatagagtccggtacggaggtttgtgaacttggcgatgggtagaccaccgtatgtgttgttggttacgatgttgtcggtggctgtaagtttgctcgtataagctacattgccatattcaaagtcttcccaatcggattcgtaagtaccgatggtccagtacagacgcgggtcgagtttgccgtcagtagtacgttctgctttgaagagatggtagagccagggggaagccgaaatgtcggcccaaccgccataattgccgggagcgaagttactctcgatggccgaaccttgggtggcattcgggctggtgttcaccggagtccactcgtcgtcggtcccttgtgattctaagtcaaggaattgcacttcgaaaaggctttccttgttgttctcataggcaggaccttcacgaaagttgtcgccatagttatccatcagttcataagtaccatattttttgccgataatgtctttcagtacagtaagggcgtctttgaatttatggcgtaccatgagcgcacgggcatagtaaccggctgcggcaccacaggtggcacgtcctttttcccattcgccaccttgatctcgtgagggtaacaattccatggcttctttgaaatcactttccacttggtccagcacggcatcataggtgctgttgccggtataaagcccgtccaatgaagagtaggtggcataatctgtgatgaggggcgggttctggtaataaccaaccagattgtagtatgacagaccgcgcaggaagagcacttgtcctttgatgcgtttcattttttcggaaagctggctgttgtcttcatcgcaacgggaaatggcaaaattacatacattaacggtgtagtaccattcgcgccagggccaccacgtgatgtccgaggttacttccgcattcaggtcatcgaaaggcagataccatacttgtgatgaattccaggcttcatcgccacgacacacatcaatggtgtagcctacacgggcgtaagaaccttccatacggatatggttataggcggcaataacgctctcttccaaatcatcggcattgaaaccgaatgtgtttgaggtttgctggttgggatttaacagctccaaattatcattgcaagaagtcaatgtgcctaatcccaaaaagagaaccaatgcatatttattgagtttcatattgttatgtttttagtgattagaaagtgaaatgaacgccacacatgaaggtacgtgcggtaggataagaacagaagttatatcccggtgtgaaggtacctcctgcatagtccacattgtaacctttgtagccggtaaaggtgtgcaggttctgtgccgacacgtagaaacgtacatccgatacgtatttgccaaaccattcgttggggaagttgtagcccagttctatattggcaattttccaataagctgcgttctgaattttgcggtcgctgaagagatcgttccaggccaggctggcactgttggtgacataggtacgtggtacgctggaaagataggtgctgccgtcttcgctgaagcgattggcgtcgagcatggctacgtctttgttgccccagccatagcaagagttcagagagttgtggatgtcgtcgctaacgtgatagttgagtgcaccgaacgtagcgatgctcaggtcgaaacgtttgtattcgaagcgggcgttcaaaccgaaattgatcttaggcataccgctgcccaatactacctggtcattggcatctacctttccgtcaggctttccgtcgggaccgcttacgtccttatagaggcagtcaccaatttgggcgccttcttgtgtggcatggttgtccaagtcagcttgtgtgcgggcgatgccatcataaacccatccgtagaatttgccgatctcttcacctacgttggtgatgtaggcgccggagatgtatgaatcggtaccgaagcccaatgaggttacgcggttacggacagtacttaagttagccgacacttcatacttgaagtcgtggtctcggttgcggtaagtagctgcaaattcgaaacctgaattgttcatcgaagcggcgttcattgttacggtggtattggatacaccggcttgttcgggaacgggaacagcataaagcaggtcttcactggtgttcttgtaccattcggcagtgaattccagacggttgttgaacaaggcgaggtcgatacccacgttgtagcttttcttcttttcccaagaaaggttgttgtctacgaaagtggaaatggcagaaccggtgatgggcgtgttgccaaagctataagtcatgttattacgtgccattacagcctgatacatgtattcaccaatgttttcgttaccgagctcgccatagctggcacgtaccttgaacatgttgacaatgtttctgttgaaggggaagaaagactccttgtcgaaacgccatcccacagaaacagaggggaaggtgccccaacggatattttgggacaagcgggaactgccgtcgcggcgcacggttgccgagaacagataacgctcgtcgtagttgtagttgatacgcccgatgtaggataggagggtgtgtttgtattcgaagctttcagcgtaagtgttggcggcattctggagttgcaggaagtaaggctcggtgaagttgacgccccagcctgtcagcaagtcggtgttttcttcttcgtaagtctggccggctaccaggttaaaatggtgtttgccgacggtggcatcataagtcagcacgttttcaatcaaagcatcggcataagagcgggtagctttggtgagacgttcgttgcttttggccagatagacacggttgctctgtacccatgcaggaatccaggtgaagtccttgcaatgggttttgctgtaagagagattgactttatagttgagcttgtggtttttgctgtcaataccgatcattttcaggagatccacatcggcagaggctgttcctacaaagcggtctacacgggtattgcgctttaacaggttattgaccagcaaggggttggaagctgaaatgtcaccatgtacggtgtcgtagtaaacaccataaccataagagtcatagttgaagttattggcgatccctaccagattgtcaagtacccaagtagagttgtcgtaggctttgatggtgggttgcatcagcaaagtaccacgcagtatgttggttacgtctccatacagaccttgaacgtattcggaagcgtttgacaaacccatgttgtcttgatcggagtgagagtaaaccaggctggtatggaacttgatgaatttggtgtccatcgtgttgttgacacgcgccgtgtaacgttcgtagttgggaccggcgccttccagtgtacctttctggttgtagtaatctaatgaaacgttataagtattgtgggcaccgccaccggagaggttcacattgtgattttgacggatacctgttttgaacacttctttaaaccagttggtattggtgttatcctggaaatgatattttccggtggtacagtccagcttgtaaccgccgggcagcggagtgttggagttggcgcatgcctgaccgatgtactggctgtattggtcggcatccattacgtcatagacactactgggaatgtagtccatacctacgtacccattgtagtctactttcagcggttggtctttctgaccgcgtttggtagtgatgatgaccacaccgttggctgcacgcgaaccgtaaatggcagcagccgatgcatccttcagaatttggatggtttcaatatcgtttgaagagaaatcgcggatggaagtacctatggggacaccatcgataacataaagaggagaagtgtcaccaaaagatccgacgccacggatacggacggtagggtcggcaccgggctgcccgtcggaagtgacttgtacgcctgatactttaccttcgagcatggtggagatattggaatgggatgtctgtttcaaggcttccgtgtctactacagctacagaaccggtcaaatcggatttcttttgtgtgccataacctatgacaacaacttgttccagcatctggctgtcgggttgcaattggatagcttcaatgatagcgcggttacgaacagctacttcgcgttccttgtagcctacatagcttatcgaaaggatagcgtttccggcaacctccagttggaagtttccgtccacatcggtaatggttccaccttgtcctcctttaattctgacagtagctcctgtcaagggctcaccttgttcatcgataacttgaccgcgaaccttgatagccggagattgtgccacggtagctatagcaggtgtgggatacaccatcatgccacccatagcacacagactaagcattacggaaaataataaatgtttcctcatttttttaagtattaaattagtagattaaattgttgctgatgtattgaattgagatgttggattattgtacaatccaatgttgaatactctaggtagacaaaccacagagtttataaatatgctggagctattcttcataatatttaagattaggattagactttaaaagcagggttctcttccgaaagattgagcaccgattgcatgacaaaagtataatttacaccgtaaacaggggtggacaaacggttttatagggtggacgaatggataatggaaaaaaatgtatttattccgcttatagtttgcgtcttttggaggtggtgagataggcttaggagaaggctttttttatataaagtcatgtagccggacaacctggtgaaggactgtccggctacatgagggataaaatacaaataaaattctctgaaaggaattatttcacaagtaaaaatcctccttccgcctgcatcgtaatgctgacttcatcattcttttttaatgttatctcttcagcgtgaggatttagttttttatcgtcctgataaagcatcactttatctcctttagtacacatgggaaggttcaactttaatttcagcggttctttttgtgcattgattccggctatgtaccatttatcggcatgccgacgtgccagtactacgtatttgcccggatagccgtcaatgaatcttgtttcgtcccatgtggtgggaacttgcttcatgaaatccaaacaaacttggggggcatcggtcaggttattaggcgccaacgcaaaattctgaataggattttggaataaaacggctgttgccagttggaatacatcagtggtcttgcgtatgcttccgccgtcattgttgcggttgaggcgtttgttgaggaatgtgccaccaaactccatgcaaccgatggtgttgcggataaatggatgcagacaggcattaaatgcttcttcatcgcaaaaatgttgttggaaaatcaggttttccgatgcgagcacggcttcgcttcctacataattaggatacatacgctcccatccccgaggaagggtacagccgtggaaaatgaccatcagtccattatcatccgcatcgctcaggatggcttcgtacagacgcatggtttcctgcttgtcacctccgaagaagtctactttgattccttttactcctatattatgcagccatttcatttcctttttacggataatgggattgtccatgtaattggtaggaccttgcactatatcattccagtagccgctggaactataccataaaaatacatctacatttttactgtgtgcatagtctatgaagtctttcatacgttcacggccgatgttggtatcccaccagttgtctatcaatacatattcatatcccatggcggcagcaagatctacatattttttctgatcgtcgaaattgatgctgccatcttgccaaagtatccagctccaggttccgcgtcccattttgtatgtatgctccgttgggtaaagaggttccacgacatcccatggaatcgttgtttctacaatgggcttcaggttttcgcctacagtaatagtacgccaaggagtggaaccgggcaatgcaagaccgggagatgccgtaccgttaccgttgttttcttcgggcatggggaaagcgagggtataaagtccgtcggcggtggcatcgctcaggtgtgaaccacagtatttgctgtctactccggtttcactgataagtgcccagccattttctcctacatggaacagacaaggaaatgtgtaaccgtgcccatattgtgaacgtacattcataggagcgtcagccttatattcttcctcataactgggcttggtacgtttccaacctatcatggcgtcactttgcgggcacaggaaagtagtggtgaaggaggggaagtcaaaaccggtagtttctttttctatcacgatgcttcccgtatcgccatatttgggcatttcgtagcggaaagcaatatcgttgttgcttacgcggaatattatatttatatttttcttttctttattggtaaaggtgcatgtaagttcattggcttgataatgaatttgtgattgtttgatacggtcttgtgtataggtcttatctattttattctctttttgtccggtgaaagtcatatcccggctgaagtcccccacattggcaacaaaacctaaaggtgaatcttccaggatggtcttgtccttataggtaacggaataaatggggataccctgttttacggatacatttactttcaaaaaggaatcgggtcctgtaactgtagcttgttgggcaaaagctgacattgtagtgatggcaagcagccaagtcataaattgttttttcatgggtattaaatatgctattataatgtagagcaaagataatttatttagcgaggcgagagcgtagaaaaacggagcatttatggtatacaatccgttcattttacgctctggaataagtcagtcggttccattctccatcatcgaactgggtgttgttccgaaatgttttgtaaagcagcgtgtgaagtatttgggatcattgaatcccacttcgtatgctatttcggatatgttcatattgtgcgtcagccggttacggataataagttcccgcgcaagattcagccggtagttacgcatgaattgtccggcagactgtcccgtcagattttgcatttttttgttcatcaaacttttgcttacccccattgcttcgatgaaatcgcttatttcgtaataggagttcttatagttttctttcacaatctgcatcgccttgtccaggaatttcttgtcactggattctttttcgatattcagtgcatccacatccatactgtatgagaacttttgttggaaacgtttgcggttttccagtatattggatatccggaccagcagcaaagtatcatcaaatggtttcagcaggtattcgtctacacctatacggaagctttcgatacgcgattcgttggatgttttggctgtgagcatcaggaaggggatatgtgagatggcgaaattggattttacccggcgggacagttccataccatccatgacaggcatcatcaggtcgctaacaataaaatccacgttctgggattggagcacagtcaatgcttcttcaccttgggatgcttcgagcacgttataatattcggccagaatggaacggatatagtcgcgcatatctttgttgtcttctactaccagaatcgtcagtttttcattggtggcaggttgcaaggccagcggagatcctaccggttctttaatttgctctgttggtgcgggcagactgtctgcatcggcatattgcaaaggaagtaaaatacggaaagaacatcctttgctctgattattcttggcacaaattgaacctccatgcaactggacaattcgtttgcatagatagaggccgattccggtcccgctttgtccgttgatagaggaatgcgtcttgttttgtgattggtagaagcggttgaatactttgtctatctcttcttcgggcagtcctggccccgtatcccggatacagatgaacaacttttcctgctcttcctggcggaagggggtggcatagatggtaatttgtcctcctttgggggtaaatttcaaagcatttcctatcaaattgacaatcactttatgcatggcatcctcatcgtacatgatttcacatgaaggaaggcggaaacgacgttcgatggttattcctctttcggatgcatatgcgtcgaagggaaccagcagttcattgagtaacttggtaaagttgcccgggttgcggacaatttccattttccctgattctactttgcggaagtccattaattggttgaccagtgagagcagatattttgagttgcgctccacaaaatgtaattgttcaatgacttgaggattgtagcttagtttcaatgccctttctataggtcctacgattaatgtcaacggagtacggaattcatgggtgatattggtgaagaaggcgagtttgtcaaccgtcaattcctgtactttctttgacatttgtatcagttgccctttttgtttggttattttttcgttttgctgtttcaatagttggttttgacgatagagctcgcttgcctgagtggaaagcagttttttttgttcttccagttcacgggtacgttcctctactttgatgtggagcatttcttgttgttcttttaacgaacgaagcctccatgataataccttatatataaggaaagatagaagaaccaatatggacagaatgaaccagatggttttatagaaataaggtgatacggcaatgtggagttctgccatttcttccagccattgtttgccgtcgggggcataacgcagttcgaaagtatagttgccgggacgcaggttggtataggcggcttgtcgcctgttggccggcacttttatccatttgtcgtcaaatcctttcaagcggtaataataattggcgaatgtcgatgcatcataatccagtgcggcaaattcaatatagagagatttgtcgcgttcgtgtaactgtagggtgccgtttgtgtacaatcgttcttcattggccacacgaacatgggtgaatgccagaggaacagcctccttaggatttgtgtctatgactggtttgactacagacagccctttagtacttcctacatacaaatctccattggcggcacggcatattgcgttccaatagaactggttggataatagtccgtctttccgggtatagttgaagaagctgttgttgttaggattgaagcgggagagtccgttggtggtggtaatccaaagatacccttctttatcttccgatatgcagcggacactgttgtttatcagtccgtcttcggtggtgaaggagcggaaggtatattctccgttttctgttggtgaggatttgtagaaaccatatccgttgctgcctatccatagggttccgtctttagactgggtgatgtaggttaccctttccttcaactttgattccggttcgtccagcttgatcctccagagttgataaatcagtctgggggctttcaaactgcttagatctattcggcaaagtccttctgtaagtcccagccacaggtggttatccttatctatatagtatcctgtacagccttcaattccacctaggttcatacccttgaatggttcggtgagcgtttgtgttttcaagtcgtaaacatagatattggtactggttcccacccagatggcattattcaagtggtcatagcagatacttccggcccatccccatgagaagtctccgtattcgggtatttctatgtggtggaattgtttgttctgcggatttttcatgtctatccatcctatgcctcctccccaggttcctatccagagccttccatcgttatcgctggtaaaacaactgacggtattatggcttaggtgggcgggtgcatcagtggtatagtgttcaaaagtgttgctgccgggagcccgccggtttaaacctccttctacggttcctacccataaaacacccgacgggtcttcataaatggcattgacgggattttgggaaagacttccaggaatggtgggaatatgataatagttttgtaccaacagcatccggcggctcatcttgttcagccctcccacttcggttcctacccagataatgtcaccatcggtcagcagacagtttacgaagtcacagttcaatgtgttttgtacaatttctccttctccggtatctttatttatccgctcaaaattgtctgtcaacgcattataaaggtttataccttttagggtggcgaccagcatggtatgttctcctgtttctgctatgtctgtgataaagttttgggaaagcgagttgttgtcattcggatcgtacatataatgcttcatcagttccgtatccatattgtatcggaaaaggccttgtgcgctgccaatccaaatttcattttctttccggcagattacttgtatggacacaccgggtaattgcagggcagatgaaatgaatgtgggttcctgtacttccatagccgattctttgatgcggtagataccgtctttgtagtttatccaaagatagtcttccacctcacaaatagtccggacggattctcctgccggcacttcgcatattttaatgatctgtcttatatttccttgtttgtcaaaggtaattttgaataaattgttttccgaacaaacccaaatatttcccgctttgctatggagaatgagatgggaggggcggttgcacagtgaaataagtttgtctttcgtatcagcgacttgtacagtctgcatggtttgtatatccaatatgtcaatacccatttcactgacagcccaaatacgcttgaagttatcctcacacagtttgtttatgaagttgcttcgtagtttggtgtgggtgcttcccatattgaaggcggtaaattcataaccgtcataacgggcgattccttccccacgggtggcaatccataaaaagccctggctgtctttcaatatatcgtccacgaagttgtgaggcagtttttcatccatcgtaatagcggtgacgttatagcgttcagaccattttccggcggtcccttcagcttgtatagacaggctcgacagaaagatgaacagagcaaatagcaaagaatgtcttttcatagtgtgtagttcattaatgacgtaagaatataccattatggaaacaaagatataccttttcgtttttccttaaaaacaaacaaatcatttttatccctctgctgtacaaatgtccaccctttaagcgatattgtccacctggcgagcttttggttgcagctatatttgcattaataataattagtcaatgtgtcaatgtgccaattggctgcgctatatgccacatggccattgacaaattagtacattagcaaatggtcatataataaacaaaatactatgaaacagcaattttttcctcaaagattattcatggacatgaagaggttaataataaataggttggttggtttaggcctgttggtcgtaggggcattggtatcatgcaatgcacctacggctttcgtgcctgttccttcaccgaatccttgggtggatgattataccgccctttcgtctatggaaaattacaagcagtggggaacgtataatgtacacgatccggcctgtaaaaaaataggggatacctattatatgtattccactgatgctatctttgccgagaaccggaaagaggcggaagagaagaatgtaccgttaggttttatccaggtacgcaaatcaaaagatctggtacattgggattttgtgggatgggcctttcccgaaatacctgctccggctatagaatgggtccatagtcaggcggaaggaaaaggggcgactaacatttgggctcccttcctgatgccttatcagggtatttatcgtttgtattattgtgtatcggcattcggcaggaatacatcctatatcggtatggccgagtcggattctcccgaaggtccctggatacagaaagggtgtgtggtcaagacaggggaaggggatgcgatgaatgccatagacccttctgttattgaggacccggaaaccggaaagtggtggatgcattatggctcttatttcggcggtctgtactgtgtggaactgaatcccgaaacaggaatgactatgcagccggaggatcatgggcacttgatagcacgtcgggccaattaccggaaagacaatctggaagcgccggaaatcatgtatcagccggaacttggcaaatattatctgtttacatcctacgatccgctgatgactacctataatgtacgtgtcgcttattccgattctcccgaagggccttttgtggatttctatggagaggatataaaagatacaacgaataatgttcccattttgacagctccttaccgcttcgaaaatcatccgggatgggcgggaacggctcattgcggtcttattgacgccggtgacggccgttattttatgactcatcagggacggctctctcctcagaaccagttgatggatctgcatgtacgtgaagtgttctttactgtaaacggatggcctgtggtttctcccgaacgctatgcaggtactgctccgcgctctttcactaaagaagatttggcaggtgagtgggaaattatccgtcttcaggagccgcctctggaacgtagcttggaggccggtcagataatgtggggcgagggagacttgcgaaatggggagcaggcattgtctgcccgtgtcgttttggaagcagatggcagtgttggagatgcaacttgggattttaatgttaaaaaacaacttcttactataaaaacagccacagaagatattaacaatttgattatctttgccggacacgattgggaaaatgaaacagaaaccattctctttaccggcctggatgctcaagggcattcggtatggggaaagagaattaactaataaaaattaataatattactatcatgaaattacaccgaactctattcacagcatgggtatttgctgccggagtagcgctacatgcacagaatgcgcacaacatggtcgtgcagaccaataaacttggtgcggaaatacaaccaaccatgtatggtttgttttttgaggacattaattatggagccgacggaggattgtatgccgaactggtaaagaaccgttcattcgaattcccgcaacgttttatggggtggaatgttttcggtaacgtgaccttgatggatgacgggccgtttgaacgaaatccgcattatgtccgtctgggtaattccgggcacagggaaaaacatacagggattgaaaacgaaggtttcttcggtataggtgtcaaggaaggagccgagtaccgtttttccgtatgggcacgtggtgagaaccagaaacttcgcattgaattgatcaagaatgatacgatggaggaacgtcaggcttttgagtcaaaagaactgacagtgaactcgaaggattggaaacaatatgaggtgatattgaaatcgccgagaacggaacccaaggctcatctccgtattttccttgaaagtgcgggaacggtggatctggaacatgtttctcttttccctgtggatacttggaaagaacgtaagaacgggcttcgcaaggacttggtgcaggctttatatgatatcaaacccggtgttttccgttttcccggcggctgtattgtggaaggtacggatgaggctacccgttacgaatggaaaaaaacagtaggtgcggtagagaatcgtccgttgaatgaaaaccgctggcattatacgttcaagcatcgtttcttccccgattatttccagacttacggactgggcttctttgagtatttccagttgtcggaggatataggcgccgaaccgttgcctattctgaactgcggactggtatgccagtatcagaatgaccccgaccagcaggtcagcttgtccaaacttgattcgtatatacaggatgcattggatctgattgaatttgccaatggtgatgttacgactacttggggaaaagttcgtgcggatatgggacaccctgctcccttcaacttgaagttcttgggcattggtaacgaacaatggggaccggaatatccggaacgtctgaaacagtttgtcgaggtgcttcgtaaggcgcatcccgaaatcaagattgtcggcagttcgggacctcagtctgaaggtaaagactttgattacttatggccggaaatgaaaaatctgaaagtggatttggtggatgagcatttctatcgtcccgaaagctggttcctggcacaaggtaaccgttatgacaattacgaccgcaaaggtccgaaggtctttgccggagaatatgcttgtcatggaaaaggcaagaaatggaaccattttaatgctgctttaatggaagctgcgttcatgaccggcctggaacgcaatgccgatgtggtacacatggctacttatgcgcctttgtttgctcatgtggaagggtggcagtggcgtccggatttgatttggtttgataatctgaattccgtccgtacttgcagttactatgtacaacagttgtacagtcataataaaggcacgcatgtattgccgctgacaatggataaaaaagctgtgagcggtcaggaaggacaggatggtctgtttgccagtgccgtatgggataaggatgaaaaggcttgtatcgtgaaaattgccaatacttcggataaggcacaaccggtatcagtgactttcaacggattgaagaagagtgataaacttgtggaaggtaaatgcatcacgctccagtctgccgatttggataaagataacacggtagagcatccgaatgtcattactccgaaagaaagtgatgttacgattgagggtaatgtactgaatgtagagatggcgcccaagactttcgtgctttataagtttgttaaggcaagtaataagtaaaagatgaatcattcctttaaatgctaacacagaggtatagagaaacataaagcagccgaagggctgctttataatcccaactgcatccggaacttttaaaggaaatgtatacctgtctcccttggttgtaccaagggagtttttttgattatacgtatattgtcatcttggattgctcacggtattttgctgtaaatcagtaatgtaccgtgaaaatacattctaaactcccccgaaacggtttgccattctccgctgccaaatttggtttgacggatatcggttgttctgattcctgtgtcatagctacggttgttcccttgcaggagagcgtcataaggcgtatttttgttcgggtgcgttcattgcttcactaaggtgaagaggcagcttcgcttaggtgaacagccgctttcacccaagtggaataactgcttcacctgggtgaaatatcaaatggagtgaggtgaaggtatgatgagaataggttcttctgatgcctacgagctaccgggaggtaacgaggggctgattttacattctgtccgagagaatctccgaagcagatgtatttcgccaccggcataccgattgaggaggttttgaaagactgtcgcacgggaagttattggtaatgagtgagttgttgtgatggaatgcttttgtgttttatgtaaatgagtcaaaagtgatttttgttgtcgttatgttgtatgggcgggctcatgggcctgcccatacggtggaacatttgatggttatttcggatttttgaaatatcctcttattggatgagtcctgtttacatctttattctcttattgcgtacttgcctcagaatggtctgcaactcaaatactttctcaggatacttttctgctacattctcttgttcgctcaccttttccatttcatataactggggaacgttcaggtttccggtttctattttttctgctttcatgaaagtggtcggatcatcattcggttcaatgtattttcagtctttggtacggacggacaacgtgtggttcatggattgttccacaatccaggggcggtctgtcttgtcggttcctatcagattccctaaacggtcataactgtccggagcgctgcctttaggtaatctggcgttgatcaaagctcctaaagaggctagccagtcaatctgtgacattaatacgtccgagtctcctgtctgttttatcttctgtggccagcggacaatgaccggaacggctgttccaccctcgaaagcgctgtatttgtttcctctccacggaccggaaggtgtatgtccgttcaacagctcttctgccttgtccttatatccgtcgtctacaaccggaccattgtcgctggatagaataatcagcgtgttttcagttagtccaagttggtccaatgtttccatcagctggcctaccgtccagtcgaattgggcgattgcgtctccgcgtagtcccataggattctttccacggaagcggtcatggggaaaacgaggaacgtgtacatcattggttgcaaaatacataaagaaaggctcgtctttatgctgtttgataaagtcgatggcatgaacggtgatggaatcggcaatgttctcgtctttccaaagtgcttttccgccccctttcataaatccgatgcggctgatgccattgacgatggacatgtcatgtccgttgctgggatgtaggttatacagtaattcgggattatctttgccggtcggttctcccggaaagttcttggtgtaactcacttctatgggatcggacggatcatagttggctaccttgccgttttctataaatacacaaggtacacggtcggctgtagcggccatgatatagtgatagtcaaagcctaagtcacctaaagcggctggtaaaggagcattccaatcctgcccgcctgtcttgtctcccaggcccagatgccatttgccgatggcggctgtagcatatccggcacttttaaacatgtctgccatggtgtattgttcgggacggataatcatttttacatctcctgcggcaatatccgtgtccggtctgcgccatgcatattctcctgtcagcaaggagtagcgggatggggtgctggtagcggctacggtatgtgcattagtgaaacgaatgccttccgatgccagtttgtcaacatggggagtttctacattcttggctccgtaacattttaaatctccatatcccaggtcatctgccagaataacgataacattgggcttttggggggcctgcgtactgtttttttgaacggtttctgctgttgcagagttacaggcggctaatgaggcaagtaaggatatgcctgcataatttctacttttcatctctatttatttaaggtttgatccggatacatgtctattttcactttccggtttctcgacctgaaggtgaagaacgacggaaagttatcaagaaaatcttgaagcagcaaaaaagagggccgaaatatgatttgaaagtgtctggaattagatgataatgcccccacccagtactacatcatccctatagaaagcggctgcctgtcccggagcaatggctgtcagcggctcgtgcagttgtacatgcagggtgttatccggttgcagggttactgtgcagcggttggcttgtttccgatagcgtattttgacgatgatgtcgtccttgtttagtaataaagcgggattggtgatgcgccattctttcagtctcatttctgttttttccagtgctttcaagtcgctcagtatgactttgttttctgccggaatgatttctttgacaaagacagcccggttaagatctatgcccaatcctctccgctggccgatggtatagaaaggataacctttgtgccgtgcgataaaattccccatttcatcgaagaatttacccggtaggatacttccttcaggtaattccttatgtaggaatgtgcggtagtccatggggcagaagcagactcccagactgtcccgtttatgggcggctttcagaaaaccacgctctgccgcgatttcacggacacgggctttagtcaggttgcccatagggagaagcatacgttgcaggatttcttgtggcagcccccataggaaaaaggattggtctttatccgggtcggcaccggtagtgatgtgatagcatccattgatgaagcgccggcgtacataatgtcctgtagcgaagtgataaattcccatttcatcggatattttcttcaaaagaggccatttcaggtagttgttgcacaaggtacagggaaccggggtatgacctgccatatattcgttgatgaaatagtcaatgatggttttccggaaggtgtcacgaacatcgtatgtgagatgggggatgttcagacgttcacataaagcgcgggcgtcctccagatactctgtatcattttctttttcataaaagcggaaggtgatgccggttacttcgtatcctgcatcctgcaatagaagggcggctacggaactgtctgttcctccgctcatgcctagtaggactttattattggactctgtttctctcatctttatagcagttttgtgaggatggatgccggaatatccattttggagaaggcaaacagtttctttcccaaatctttcaaagaggctccgatgtgatatacgtcggattggtctataataagaaaacggtcatgtgcctggctattagcccattggcggaattggattcctcgtttcgtatttacacggtatcctactgatataatcacatctaaattataatattctaagttacgggtaatctgtctgttgccttcttggcgaactgttcggaaattccgaacggttgaactttggattagttcttctgatttataaatgttctttagatgctcgcttatattggctttgctggattggaatagttctactatttgtgcctgggtcagccacactgtttcatcttcaatgcgcacttccatcctcactgattcatccggctggtagagtatgatttctccttgttgttccatgtgttcgattttttgagtacaaagctagcaaatataaatcagactgatcttgttttcaggttataattgaaatgtaggatgggaaatgaaactccgatgacaatctatatgatagtgccatcggagttctgacatactcttcttattaaggaaggaatgcttgctatgtttttattttaccggcatcaatgtgaatccccaatgatattccttattggcgggtagggtatgttccggcagagggcggtctccccagctgtcataaccggctataccttgttgcttcatatcaatacatacttccacaaaattacgtggggtgatatcattgacatgtgtcatgcggcgtattacatttttagctttttcctcattatggttagcaacttcttcgggagtgaagttagtccactgacggggacggctgatagcttcttccgagtcaaagtcctctacggagttgcgcagggcattgaatccgatagtgctgtcggcacgtattaacaatccttttccgcctttgcgggtcagttctacccaacgggtgtcggtgcggtgtccgttttcttgcggacggacatagttgttggtgtacatctggtcggctgtagtgcggtagagatcaacgaagctgcttgcattacggtcgatgtagttttcacccggtccgcgtccgaagtattctacctggttcatatcggatggcaaatggaaacgtacaccgatacgtggtacgttcagtttggaagaggcaaggcgttgagcatcctgtcccggtgtgaaagtggccattaaggtagcttctgatacttccgtgtcggcagccttcatatcggtagaagtaaaggtgatgcctgcatgaaccacaccgtcgggatagatggtatatttcatgatgtacagattgcctgccgccagtaggtaattgactgttaatacggtcttgttgccgtctgttgttgtggtaacatctgctacattgaaattcttgctggactgtttccatatttgctcgcgcttaggcccaccgttaccataatcattgtccgtcggtgcgcgccagaagttaggctgaataccaaaaccttcagcgaaatattctgtaccgtttactttgtatgaagtcacgagtccgcttctcttgttgaaaacgaactgcatacgtggtgataatacggtgatgatgtcaccatccgtgctgacggtagtcttgccgcttgctttatgtccggtcatagccaatggttctatgggcaggcggaattgttcggaagcaatatcgtgtcctgcaggaatcaagggctccggttctgtggtggtaactacaaaatctacaaaatattctgtgccggccttgggtttcaatccgttgaggttgatgttcagttctttggaaccttgcggttcgatatctaatgatacttttccgcctttgattgtttttccgtttgcctttacggtataactgatcatatactttttcaagttggtgaagtagaaacggttttttaccaggaatttgccggcagccgggtcgatggcttcgaaacctacattctgatgtgcatatttcacttctgtcatggccggatgcggagtgcggtccggagctacgattccattgcataggaagtttccgtcgctgggtgcattggttccgtaatcacctccgtaggcccagtaggtacgtccattttcgtctgtttccagaataccttggtctacccagtcccaaatgtaaccgccttgcaggttcgggtacttgtagattgctctccattgtgctgccagattaccattggaattgcccatagcgtgtgaatattcggatggtgcgatgggacggtcgctgcctttcttgcctatttcttccagccaggcggcactggggtattggggtacatacatatctgtgttccattcccaaagggcgcgttcataatttacaggacggttcatcccttttacttcgcgttctttcagccataaataggtctgatagaaattataaccgtttccggcttcgtttcctaatgaccagatggctacagagggatggtttttgttacgctcgtacatattaatggtacggtccatgtgcggcttcagccattcgggatggttgcccaatgttccgccccggcttaagttataatacataccgtggctttcgatgttggcttcatcatatacatagataccatattcatcacacaattcatagaacttgcggtcttgcggatagtggcagaggcgcacgctgttgatgttgttctgtttcatcagggtgaagtccttgcgcatcagctcttcgggaacataatgtcctgtttcgggattatgttcgtgtatgtttacacctttcagcttgatgggttggccgttgacgaacaagcaaacgtatggtttgccgttttcggctatctgatcggttggtttgatctcgaaacggcggaaacctaccgtataaggaatgatttcgcttgttttttctccgtctttcagagatatcagtaaccgatacaggttagggtgttctgatgtccaggtcttgacgttgctgagggcggcttcaaaagagatgctcttctgcccgtctgctgtaacaggacagggggtgttaccttctgcaaccactttctttgtggcatccagcaattcgtatgctacggttacctctttgttggctgctgtatggttggttacgtccacattcagtttgaagataccattcttataagtgtcgtccagtgtagacaccacattgaaatctttgatgtgggttttgggctgtgagaacaggaatacatcacgttcaataccgctcatgcgccagaagtcctggcattccagataagaaccggtactccagcggaatattttgatgaccagcgagtttttgccgggtttcaggtagttgttgattaagaattctgccggattcttggagtcttcgctgtatcccacttcctgtccgttgacatacacgtatacaccggattttgctccttccaaacggaggaatatgtcgcgtccatcccaatcggcgggaatttcgatatcacgctgatacacaccgaccggattggtttcgggtaactgcggcggttgtggatttctgggtttgaattcgtatccatgattggtgtagatggccactccgtagccctgtacttcccagttgccgggtactttaatctccttccaggctatgttggcatccggttgctcaatgttggcaggcagatctttgtatgcatctgcataataaaagttccatgtaccgtttagtagtttgtaataagggctgttctcatactcgccggtcagtgcctggttccggttgtcgtaagtcatgaaagctgtgcgtggatattccttgttgacggctacggtctgaatatctttccaataaggtagttttgtatcttccgcatgaagaacttgtgttgaatatgcgcatacagcagcgctgatcaggaatttaaataaggttgtcattttaggtttcataggttcaaatagaaaaatgaagaagaaagggcgctagtaccggcgcccctttccttaagtccttttatgtaaaatagcaattatttaattgcgtctgccagttcagcacctggtttgaacttggttacttttttagcaggaatagtaatcgttgcttttgtggatgggttgatacctgttcttgcacttctttcagcaacagagaatgttccgaatccgattaatgatactttgtccccttcttggagggcttttgttacagttgaaacgaaagcttcaactgctttttttgcgtcgactttgctcaagccggcttcagcggcgactgcgctgataagatctgccttattcataacgaaaatgattaattattaaatgtaacacaaaagttttaccaaaatcagtgacaaatatatgctttcaaaattagaaatcaaacagatagcctaaaaaagatgctccaaaaatcaaaaaaacgtaagagaactcttgttttctgttatataacagaataaaattgtaaatttgcgcgcaatcaatgttttataagacgaagaatatttatgaacagtatacctacagtaaccaagaatttattgataataaatgtgttgtgtttctttggcggcgtggtagccatgaagtatggaattgacttgaacgacctgctgggactgcacttttttatggcatctgattttaatcctgcccagttgattacttatatgtttatgcatggcggtttccagcatatcttttttaacatgtttgctttgtggatgtttggccgtacgcttgaacaggtctggggaccgaaacgtttcttatcctattatatggtatgtggtataggtgcgggactggtgcaggagctggtgcaatatatacaatatgtgactgaattatcgcagtatgacagtgtgaatacggggattgccgtgatcccgatggcggagtacttgaatctgatgactacagttggcgcttcgggagcgatatatggcattttgttggcattcggtatgctgttccccaatagtcagatgtttgtattccctatcccatttcctgtcaaggctaaatattttgtgatgggatatgctgctttggagatatttttgggcttgggtgcttcgaccgatggcgttgcccactttgcacacttgggaggtatgatttttggctttatattgataatgtattggagaaaaaagaataacaatgggcagttttattactgatttgaaaaatagtttcaacaaagggaacatatatatccagtttatatatattaatgtaggggtattcattgtaacttccttattgggaattttatggatgctgttcaaccggaatggagcatttgtgcttcaatatttggaactgccggcctggacgttgcagtttgtcaagcagccttggtctttgctgacttatatgttcatgcacgcaggtattttgcatttgctgtttaatatgctgtggctttattggttcgggcagatgtttctgtctcttttctcggcaaagcatttccgcgggctctatctgttgggaggtatttgtggcggtttgttgtatatgatcgcttacaatgttttcccttatttcagtgattctttgtattattcttatttgttgggagcatcagcttccgtacttgctatcgttgtggccactgcggtacgtgcaccggaatatagagtaaactttatgtttattgggactgttaggttgaagtatgtggctctgtttatggttgtgaccgatttgctgtttatgacatcgggcaatgccggtggccatatcgctcatttaggaggtgctttggccggatggtggtttgcttccggattgtcccgcggacatgatgctacgtcatggataaaccgatgcttggattgcttctcggaaggtctttcgtttcgtcgtcaatcgaaaagaccgaagatgaaagttcattatggtgataaggcaaaagattacgattataatgcccgtaaaaaacagcaaagcgaggagatagaccgtatattggataaattaaagaaatccggttataacagtctgactaccgaagagaagaaaagcttgtttgatgcgagcaaaaagtgatatatgaaatatattggtcgttttttgggatggatactactgggcataaacttgtgtatggtggtattgttactggtatgtgcttacagcccttatattgatcctgtggctcatccggtatggtcatgtgccggtttggcttttcccgcttttttgattgttaatcttttgtttctggtcttctggttggtgatttatcgtaaatatgcgttgctttcatttttaggcctggtatgttccattggtgctatccgtacttatttcccagtcaatgtatttgtatctgatgtaccggaaggggcaatcaaattcttatcctacaatacgatggcctttgaaaagaaccgtgcgaacaccaaggataatccgaaccctgtgctggaatatttaagaaacagcaatgcggatataatctgcctgcaggaatatattgtaggcggacggttaaccaagaaagaggtggattatgctttaagagattatccttataaaaattatcataagatatcgggggccaacggtttgggttgttattcccgttttcctattttgtcggcacatccggtgaaatatgccagccttaacaatggttccatcgcttataaaatcaaagtgaatggtgataccttgctggttgttaataatcatctggaatccaataagctgactgagaaggataaagaagtctatcgcgaaatgatgaaggatcctgataagcaaaaggtatcgcaagggtctcgtttgctgatcggaaaactggcggaagcatcggctatacgtgccgttcaggctgattccatagctcgtttggtggccggttacaaagggggaggcataattgtatgcggtgacttcaatgattctcctatatcatacactcacagggtggtaggggaaggtctgaatgatgcttttgtggagtcgggaaacggctttggcatatcttataatcaaaatcatttttatttcagaatagacaatattttattgagcaagaatttaaaatcttaccgttgtacggtggataatacgataaagagttcggatcattaccccatttggtgttatgtggcggagaagtgattttacatacctttaattgacagattatgaaaagactattatttacgttagcgacgtgttgcgtaatgtgtgcatgtgaacagaaaacagaaatgaatccgttctttacggaattccagaccgagtacggtgctcccgattttactaagatcagactggagcattatgaacctgctttcttgaaaggaatagaggagcagaatgcggaaattaaggcaatagttgataatcccgaggaacctacttttgaaaataccattgtggcgctggataaaagtggcgggattttggcgagagtaagtggggtgttttttgcattgaccgaagcggatacaaatgattcgttgacggccttgaatgaaaagatggctcctgtactttcagaacatagtgataatatttatttgaatcaggatttgtataaacgggtggctgatgtgcatcaacaggaacgggaaggtaagataactcttacgactgagcaacaccggctgttggacaagtattataaagcttttgtccgttcgggtgccggactggatgccggaaaacaatcccgtttgagggagatcaataaagaattgtcgactttggggattgctttcgacaatcatatcttaaatgagaataacgcttatcagttggttatcgagaatgaggctgatttggccgggttacccgaatgggtgaaagcaggggccgcagaggaagcgaaagctgctggaaaagaagggaaatggctattcactttgcaaaactccagtcgcttgccttttttgcaatatgctgaaaaccgtgagctaagaaaaaatatttatgaagcttatatcaaccgggggaatcatgatgatgcgaatgacaataaagagatattgggaaagatcatggcattgcgtttggaacaggcaaaattattaggattcgattgttattccaattttgtactggatgagaacatggctaagaattcgcagacagtcatggatttcttgaacaacctgtggggatactcactggaaaatgcaaagaaagaggccgccgagttgcagaaaataatggataaggaaggtaagggagagaagctggctgcatgggactggtggtattatgccgaaaaattgcgtcaggaaaagtatgatttgaatgaagatgaaatcaagccctatttcagtttggaagatgtgcgtagcggattgtataccgtggccaacaaactgtatggcattacattgaccgaactgaatgatgtgcccgtatatgagccggatgtgaaagtgtatgaagtaaaggatgccgatggctcatttttgggattgttctatgcggattactttccacgcgcaggtaagcgtggtggcgcatggatgagtaattttcgtgaacaggccggtgaagtacgtcctttaatttataatgtggcaagttttactaaacctgcaggaaatatgccttctttactgactttggatgaggtggaaaccatgtttcatgagtttggacatgcattgcacggtatgctgaccaagtgtaactacaaaggagtgtccggtaccagtgtggcgcaggattttgtagaacttccttcacagattatggaacactgggctgtagaacctgaagtgctgaaactctatgccaagcattacgaaacaagagaagtgattccggatgagctgattacgaaaatccaaaatcagggtacttttaatcaaggttttatgaccacggaattattggcagccgctttgcttgatatggaactgcataacctgactgatacagacaacctgaatgtcgttgcttttgaaaaagaaacgatggacaagctggggctgattcctgaaatagctcctcggtatcgcgccacttattttagtcatattataggtggatatgctgctgggtattacagctatctatgggcagaagttcttgacacggatgcttttgaagcgtttaaagaacatggagtgttcgataaaaataccgcagactcttttcgtaaaaatattctagagaaaggtggaacggaagatcctatgaccctttacagaggttttcgtggggctgatcccagcttggaacccttgcttaaaaacaggggtttgaaataaaatagactgtgagatagaataatttaggctgcaaaaaatgcttttgcagccttttttctcttttggaatctaaatatttgtgtttgataccgtgggaatgtgaaaaaaaaactatatttgcaaccttgtataaactaagaattaatcaaaaagtaaaaataataaatttcaaagtaacatgcaaaacaaaggatttgtaaaggtttttgcggtattactcacccttgtatgtgtgttttatctttctttctcttttgtgacccgctatcacatggacaaagcggcacaagacccgaaaggtgaagcacattaccttgattctatgcagaatgaaaaagtttatttgggtagttatacgctgaaacagtgtcgcgagatggagattggtctgggtctggacctgaaaggtggtatgaacgttattcttgaagtttctgtaccggatgtagtgaaggctttggctgacaacaagactgatgaagcttttaacaaagcggttgcagaagcatcaaaacaatctatcactagtcaggatgactttatcactctttttgtaaaagagtataagaaacaagctcccaatggcaaattggctgaattatttgctactcagcagttgaaagacaaagtaaccacccgcagttccgacagtgaagttgaaaaagtattgcgcgaagaggtaaaggctgctatcgacaactcttataatgtattacgtacacgtattgaccgttttggtgtggcacagcctaacattcaggcgttggaaggaaagatgggccgtatcatggtggaactgccgggtatcaaagaaccggaacgtgtcagaaaactgttgcagggatctgctaacttggaattctgggaaactttcgacgcaaaagaaatagttccttatctttcttctgtagataacagactgcgtgatattcttgccgttgaaagtggtgctgcttctgctgattctgtagctactgatactgttgctgtcgcacaggcttctgcaatttctgctgccgacagtcttgcagccgcattgaaaggcgaaacggcaagtaattctgccgcaatggagcagatgaagaaagaacatccgttggcttctgttcttcaattaaatccgaatggttacgggtcggtggtaggttatgccgattataaagatactgctcaggtaaaccagtaccttgctatgaaagaagtgaaagaaatgttgccgaaagatcttcgtttgaaatggggtgtaaaggctgctgactttgacaagcagggacgtatttttgaattgtatgctatcaagtctactgaacgtaacggacgtgctccgttggaaggtgatgtgatcactgatgctaaagatgaatatgaccagttcaacaagccttgtgtcagtatgtctatgaacactgacggcgcacgccgctgggctgttctgacaaagaacaatgtaggcaaggctatcgctatcgtactggatggttacgtatacagcgctccgaatgtaaacggtgaaattacggggggacactctcagattaccggtaactttaccccggaggtgacaaaagacttggctaacgtattgaagtctggtaagatgcctgctcctgcacgtatcgttcaggaggatattgttggtccgtcattgggtcaggaatctatcaatcaaggtattatttcatttgttgttgcgttgattctgttgatgatctatatgtgcgctatgtacggattgattccgggtatggttgccaactgcgcattggttgttaacttcttcttcacattaggaatccttacctcgttccaagctgcactgaccatgtctggtattgccggtatggtgttgtcattgggtatggctgtagatgctaacgtgttgatttatgaacgtacaaaagaagaattgagagccggtaaaactgttaaggctgctttagcagacggttattctaacgcattctctgctatttttgactcaaacttgacatcaattatcactggtatcattctgttctatttcggtacgggtccgattcgtggttttgccactacgttgattatcggtatcctctgctcattctttacagcagtattcttgacccgtattgtttatgagcacttcatgaataaagacaagtggttgaacttgacattcactacagggatctccaagaatctgatgcagaacgtgaattacaactttatgggaatgatgaaacgttcattcacggtattcggagcgattatcgttatctgtatcatttcattctttatccgtggtttggcgcagagtattgactttaccggtggacgtaacttcgtagttcagtttgaacagcaggttgaacctgaaacagtgcgtgacctgttgaagaagaaaatcacagaagataatgtacaggctattgctttgggtacagacaagaagacaatccgtattacaaccaattaccgtattaatgaagattctcctactatcgactctgaaattgaagagttcttgtatcagtctttgaaagatggtaacttgctgggcgaaggtactacattggaaatctttattgaccgtgataatcgtgtcggtggttctatcatcagttctcagaaagtaggtcctagtatcgctgatgatatcaagacttcggctgtctggtctgtattgtttgcattggtggctatcggtttgtatatcttgctgcgtttccgcaatgtagcttatagtgtgggtgcgactgttgcattggctgtcgatactattttgatcatcggtgcatactcgttatgttatggatgggttccgttctcattggaaattgaccagacttttattggcgctattttgaccgctatcggttattctatcaatgacaaggtggttatctttgaccgtatccgtgagttcttcggtctgtatccgaaacgtaaccgtatgcagttgtttaatgattcattgaatactactttggctcgtaccatcaatacttcattaagtacattgatcgtattgttgtgtatcttcgtgctgggtggtgacagtatccgcagcttcgcctttgcaatgattttgggcgttgtgatcggtacattgtcttctatcttcattgctgctcctatcgcttacctgactatgggtaacaagatgccggaagaaacaaaggcataagaaggtttcttttaagaaataaataaaaagaggaggatgctcattcatgagcatcctcctctttttataatggtcgattggaattggtttgtggaaaaagggtagatgaatcttctgtggcttcaaaaattaacttaagtacattgggtaagtaacttagcttgcttggcatttcaacttagcttgcttgtcccatgaagttaacttgcttttttacactgtatcttgcagatcaattctgtttggctataatcgtgaaaatagttatctgactactcttcctgaagtgtttccttgcattaactcttccacttcttctactgttacttgattgaaatctccatatatggtatttttcaatgcagatgcggcaagggcgaattccaatgttttttggtcattgtcggggtaggtcagcaaaccataaatcatgccgcctacaaatgcatctcctgcacccacacggtctacttcatggacaatatcgtaaatgccggtatgctttaatgttcctttagaataaagtatggctgccagcagattgtgattggaagtgatggtattacgcaactccagaaacattttctggcatcggggagcttgttctgatactttttgaccgaatactttgaaaccggacaaatctaatggatatgaggtgtctacagctttaaaacctaccgggggaatgccgaaaatttctttgtattcgggttctgcaccaaaaatgacatcactatattgaacaagggggagcattacctctgatgcggatttaccgtaattccataattttttgcggaaatttaagtcgcatgagattgttaatcccaggcggtctgctgtttgcagtgcttccaggcaggcatctgctccttcctgtgacagggacgctgctatacccgaccagtggaaccagcctgcatcggaaagaatcttttcccagtctatcatgccgggacgtaaagtggcaaaggaagagccttcacggtcatatactacattggagttacgaaatgctgcaccgctttccagaaagtataatcccatgcgtttcccaccataaataatgccgtctgtacctaatccgtaagcttggagtgagtttacgcaggcttgtgccattgcattctcgggaagtctggtaacgaattctgtggggatgccgaagttgaccagtgatatggctacattcgcttcacttcctccataagtagcaataaactcgtttgtttgggaaaagcgctggaaattgggggcggtcagccttagcattacttctccgaatgtaacgactttcttgttctgggtaatagctcttgtattcatagtatgtttttaatcagtatgttaatttgcacgaagatacgatcaaaattttatataagtgcaagaaatgtataaaaatagccttctctatcttttccatatagaatagagaaggctattttatttattcaatattagtggtttatttattgaatcgtatttttagtttggcaagcatatcctgtgtcatgctgtctagatcatattccggtttccatccccattcctcacgggcacaagtgtcgtccagtgagttcggccatgattcggcgatagcttgacgtagtggatctactttgtactccatatggaagtcgggcatatacttctttatattgttataaataatttccggatcaaaactcattgaagcaatgttgaacgaattgcgatgaattagtttgtcgggattcgcttccatgatttcaatggctgcacgtaaaccgtcaggcatatacatcatatccatgaatgtaccggctgcaataggacattcaaatttttcaccttttacagccgaataatagatgtctacagcataatcggtagtcccgccacccggaggtgtgacatacgaaattaatccggggaaacgaacggagcgggtatctacgccaaaacggatatggtaataatcgctcagtaattctcctgatacttttgtaacgccatacatggtacgcggattacggatagtgtcttgcggggtcttgtctttaggggtgttgttgccgaagacaccgatagaacttggggtaaatacggcgcaacccatttcgcgtgctacttccaatacgttgaacaggcctcccatgcctattttccatgctagttgaggtttggcttctgctacagccgatagtaaggctgccaggttgtaaatggtgtcgatgttgtactttgatacagtttcggcaatttgttgttcgttggtgatatctacgatggcagaagggcctgattcttttaattcccctttaggctcagcaccgggaatatatccggctacgatattaccattgtaaatacttctcaatttcatggttagttccgaaccgatctgaccggtggagccgataattaatacatttttcatagtttgcaatttgctttaagttttcttttggaagcaaagatagatagaaaactgcatattttatcaaaattttctctataatttaatcggatatcaaaaaaaaataagaactttgtcaagtcagactgatttttaaacttaaactatatacttaataaaaaaacaaagctatgtatggtaaaatgaaggagttccttgcgaaggaactggctgatattaaggcagccggattgtataaaaatgaacgtataattaccacacctcagcgtgcggacatcaaggtgaatgacggagaagatgtgttgaacttttgtgccaacaattatttaggtttgtcagataatcaacgcttgatcaatgctgccaaagaggcgatggacacacatggcttcggtatgtcttccgtacgctttatctgtggaactcaggatttgcacaaacagctggaagctgccatttctgattattttaaaacagaagatactatactttatgcagcttgttttgatgctaacggtggtttgttcgaaccgctgtttacagaagaagacgctattatttcagatgcgttgaatcatgcatctattatagatggtgtacgcttgtgtaaggcaaaacgctatcgttatgccaatgctgatatggctgacctggaacgttgtttgcaggaagcgcaggcacagcgtcatcgtattattgctacagatggtgtattctcgatggatggtaatgtggctccattggataagatttgtgaactggcggaaaagtatgacgcgttggttatggtggatgaatctcattcggccggtgtggtaggtcctacagggcatggcgtggcagaacagtttaatgcatacgggcgtgtggatatctttactggtacattaggtaaagcatttggtggggcaatgggaggatttaccaccggtaagaaagaaattattgatatgttgcgccagcgttcccgtccttatttattctctaattctgtagctcctgccattatcggtgctagtctggaaatgtttaagatattgaaagaaagtgatgctttgcatactaagctgatggataatgtgaattatttccgtgacaggatgctggctgccggttttgacattaaaccaactcagagcgcgatttgtgctgtgatgctttatgatgcgaaactgtctcaggattttgccgccaagatgcagaaagagggcatatatgtaaccggtttctattatccggttgttccgaaaggacaggcacgtatccgtgtccagttgtctgccgggcatgaaaaggcacatttggataaggcaattgctgcatttattaaagtgggcaaagaacttggggtgattaaataagcagatttgaaagctatccagtaaaaaaagagcagtaaacggttgtataacaattgtttactgctctttgtagccccgaggggaatcgaacccctatctaaagtttaggaaacttctattctatccgttgaactacaaggcccctttatgggtacaaaggtacttctttttgttaaaatggcaatatgaaagattgaaaaatgtcttaagtgggaagaaaataatcctttctttgttgttttgttgttttttgtctgttttttataatctaataatgttgttattctgctataaactttcatgttgttcataaaacatggataaaaataataaattgtaaaaatgaatcgtttttgatgctgtcataatgatagggatttatgcttttaaacaggtaattatctctgctttttcttagcttggaaacaaataaacctttaattttgtacattttgatattcaaacgtagtttgatagcggaatattttgtcctttgacagaactttccgaactttgcaaacagtgaaattttgtaaccctaaataataagttatggcagatgaaatgatagtcaaggagttggaccaagtggtggtccgtttctcaggcgactcaggcgatggtatgcagctggccggaaatatcttttctaatatttcggctacagtgggaaatgatatcagtacattccccgattacccagcggatatacgtgccccgcaaggttcgttgaccggtgtgtcaggtttccaggtgcatatcggtgcgggtaaagtttttacccctggtgacaaatgcgacgtgctggtcgcaatgaatgccgctgcattgaaaacacaatacaaatttgcgaagtccacagcttgtatcattattgatacagattgttttcagaaatcagatctggacaaggcggctttcaaaacagacaatccgattgaagaaatgggtattaagcaggatgtaattgctgctcctatttcgcagatggtgaaagattgtctggcagatacaggcatggacaacaagtcaatgttgaaatgtcgtaatatgtttgctttgggattggtctgctggttgtttaatcgtgacctggcggttgctgaaaatttcttgcgcgagaaatttgcaaagaagccgcaaatagctgaagcgaatattaaagtgatacacgccggatatgattatgggcacaatacgcatgcgtctgtggatcatacttataaggtggaaactaagtctaaagtacctggaaagtacatggatatcagcggaaacaaggctacggcttatggcttaattgctgctgccgagaaagcaggtctgcgtttgttcctgggatcttatcccattactccggcaacagatatcttgcatgaactttctaaacataaatcattgggagtgactacggttcaatgtgaagatgaaatttcaggttgcgctacggctatcggtgcctcgtttgcaggtgcgttggcagctacttctacttcgggaccgggtgtttgtctgaaatcagaggctatgaatctggctgttattacagaattaccattggtggttattaatgtacagcgcggcggtccttctactggtttgcctactaagtctgagcaaacagatttattgcaggctttgtttggccgtaacggtgaatctcctatgccggtcattgccgcagcttctccaactcattgttttgatgctgcttatgatgcttgtaagattgccttggaacacatgaccccggtggtgttgctgactgatggttttgtagcaaatggttccggtgcatggaagttgcctgatctggcgaactatccggctattaacccaccctatgttactccggaaatgaaggataattatactccttacaagcgtaacgccgaaacaggtgtccgttattgggcattgccgggacaggaaggttatatgcatattttgggaggcttggaaaaagacagtgatacaggtgctatttctaccgagcctgaaaaccataatttgatgtgccgtttgcgtgccgagaaggttgctaaaattccagtgcctgatgttaaggtgcaaggctgcgtagaggatgcagatttgctgatagtaggtttcggtggaacttacggtcatttatattcagcaatggaggaaatgaaccatgcgggcaagaaggttgctttggcacattttgttcatttgaacccgctgcctcacaatacggcagaagtgctgaagaaatataagaaggtagtcgtggctgagcagaatcttggtcagtttgccggatatctccgtatgaaagtggacggatttgttccttatcagtttaatgaggtaaaaggccagccgttcgtagtcagcgagttagttgatgctttcactgagattttaaataaataataaccgtaaagaaagtaaagactatgaacgaatatacagcaaaagatttcaaaaagggacaacctcgctggtgtccgggttgcggtgaccattttttcttggcttcgctgcacaaagcgatggctgaattgggagtggctcctcatgatactgccgttatttcgggtatcggatgttccagccgtctgccttattacatgaatacatatgccatgcagactgtgcacggtcgtgcggctgctatttctacaggctgcaaggtggctaatccgaagattactgtctggcagatttcaggggatggtgatgggctggctattggtggaaatcattttatacacgccgttcgtcgtaatatcgacttgaatatgattttgttgaacaaccgtatatatggtttgaccaaaggacagtattctccgacctctccccgtggatttgttagcaaatcatctccttacggcactgtggaagatccgtttcatccggctgaattatgttttggtgcgcgtgggcgtttctttgcccgtgcggtagctacggatggtcctggtacagtggagattctgaaagctgctgccaatcataaaggtgcggctgtatgtgaaattcttcagaactgcgtcatttttaatgatggaacacacgaatcagtatatacgaaagaaggtcgttcaaagaatgccatttatttggaacacggtaaaccgatgttgtttggggtagataaagaatacgggctgatgcaggaaggtttcgggctgaaagtggtaaagattggcgagaatggtgtgacggaaaaagacattttagtgcacgatgctcattgtatggataatactttgcagttgaaactggcattgatggaaggaccggattttccggttgcattaggggtgatccgtgatgtggaagcgcctacttatgatgacgccgttaatgcacagattgaagaagtggccgcaaagaaaaaatatcataatttccaggaattactgatgacaaatgatatttgggaagtgaaataatattttcattttccctgtaggaaccggatctacagagttgttctaaaaattaaatggttagtaataggcagtgaataattgccggttactaaccatttaatttagaattttagtgtgtaagagaacacacctgaaactgtccttatagtttgagctttagagtttctcgccgaatgataaatcaccggcatcccctaaccccggaacaatgtatttgtgctcgtccaagacagggtctatggcggcacaccataatgtgacatcatcgccgggaaaaagttctgccatatgcgctaccccttgttggctggcaatgacacaggccatctgcaatttagctggtttgcctttggtaaggaacgctttccaggcaagttccatgctttcaccggtggcaagcatgggatcaacgagaagcaaggttctgtcattcaatgaaggagcggcgatgtattcaatgtgtacatctacaatacggtgttcatcatctttgtaaaaacggaatgcggaaacgaaagcgttgtcggcatggtcgaacatgttcagaaaaccggtgtgcagcggcagtccggcacggaataccgttgcgatcactattttgtcatcgtgtgtgctggccgtggcagttcccaagggtgtctgtacttgctttacggaataggttagtgctttactcatctcgtatgccatgatttctcctattctttcaatatttctgcggaaacgcatacgatcattttgaacatgtacatcgcgcaattccactacatattggtttaggagagaattgccttcactgagattgatgattttcatatctatgcttttgttatattgttgactttgacctgcaaagaaacaaataatttctagatttgtaaagtacgaattgcatttttgttacacaaatataaatatttgattattacggaaatttttctctaataacttcttttttttaaaataaagcactaattttgtagcgccttagacaagggggtgttgaaaaacatcttctttcagaaaataaagagtaaaaataacattatacaataaccaaattaaatcattaaaaaatggcaaatttagatttaagcaagtacggtattaccgacgtgaaggaagttctccacaatccttcttatgatgtgcttttcgctgaagaaactaaaccgggattggaaggtttcgaaaaaggacaggttactgaactgggtgctgtaaacgtaatgactggtgtttacacaggtcgttctcctaaagataaattcttcgttaagaatgaagcttctgaaaattcagtatggtggacttctgacgaatataaaaacgataacaaaccttgtactgaagaagcttgggctgacttgaagtctaaagctgtaaaacaattgagcggcaagcgtttgttcgttgttgatacattctgcggtgctaatgctgcaactcgtatgaaagtacgtttcatcatggaagtggcttggcaggctcatttcgtaactaacatgttcatccgcccgactgctgaagaactggaagcttacggagaacctgattttgtatgtttcaatgcatctaaagcaaaagttgataactataaagaactgggcttgaactctgaaacagctactgttttcaacttgaagactaaagaacaagttatcctgaacacttggtacggtggtgaaatgaagaaaggtatgttctctatcatgaactacatgaacccgcttcgtggtatcgcttccatgcactgctctgctaatacaaatatggaaggaactagttcggctatcttcttcggtttgtctggtacaggtaagactactttgtctactgacccgaaacgtaagttgatcggtgacgacgaacacggatgggatgacgaaggtgtattcaactacgaaggtggttgctatgctaaagttatcaacttggataaggaaagtgaacccgatatctacgctgctatcaaacgtgacgctttgctggaaaacgtaacagttgatgctaacggtaagattgatttcgctgataagagcgtaacagaaaacactcgtgtttcttatcctatctatcatatcgaaaacatcgttaaacctatctctaaaggtcctcacgctcaacaagttattttcttgtcagctgatgcattcggtgtattgcctccggtatctatcttgaaccctgaacaagctcagtattacttcttgtctggatttacagctaaattggctggtacagaacgtggtattactgaaccgactccgacattctctgcttgcttcggtgctgctttcttgtcattgcatcctactaagtatgctgaagaattggttaagaagatggaaaagactggtgctaaagcatatttggttaacactggttggaacggtactggtaaacgtatctctatccgcgatactcgtggtatcatcgatgctattctggatggctctattgataaggctcctactaaggttattccttacttcgatttcgttgttcctacagaattgccgggtgttgatccgaagatccttgatcctcgtgacacttacgctgacgctgctcagtgggatgaaaaagcaaaagacttggctggtcgtttcatcaagaacttcgctaagttcactggtaacgaagcaggtaagaaattggttgctgccggtccgaaattgtaatctgaattttacagatttaacatataaaaagtggttcctatcgggaaccacttttttttatgcttgaaaatgcctagatttgttgcaaaccaaatatgatagcaaatgaaattatttagattaatgttagttggtgcaggtatgttcgtattatgcagctgtacatcgcaaggttctcaacagaaggaagttgttacggatagtgtttccgtgagtcaggtagaccctgtaatagaaactattatgagccgccgtagtatacggaagtataagcccaaggctgtggaacgtgaaaaaatgcagactatagtggaatgtggaatcaatgcacctaatggaatgaataaacagtcatgggaggttcgtgtagtagataatccggaatttatcaatggtttgactgaaattttcaaaaaagaaaatcccaaagcggcagaacgtccgggatttcagaatatgttcaataatgctcctacagtagtgtttattgctaacgatcctgcatatgatatgtcacagatagattgtggtctgttgggtgagaatatgattttgtctgcttggtcaatgggaataggttcctgctgtttgggagggcctgtgcgtttcatgaaatcacctgcagctgccgaatatatgaaacagttgggattcagtgaagggtatgagttgctttatgcgattgctttcggttatcccgatgaaatgccggctgctaaacctagagaagttagtaaagtaaagtttgtagattaaatataaaaaatcccgaaggtaatatggtctccgggattttttatattaaaggtagattgattagcttttgttagctctcttacgttctgtttcgtcaagaatcactttacgcatacgcatactctttggagtaacttctacatattcatcttccttaatgtattccaatgcttcttccaacgaaaatactaccggaggaatgatgcgtgccttgtcatcagaacctgatgcgcgcatattggtaagcttcttcgatttagttacattgataaccaagtcgttttcatgaacatgttcacctactacttggccggcatatacttcgtcttgcggataaatgaaaaatttgccacgatcctgtaatttgtcaatagcgtatgcaaaagctgttccgctttccatagcaatcatagaaccgttgctgcgacgttctatctcgcccttgtatggttggtagcatttaaaacggtgagccatgatcgcttctccggccgatgctgtcagtacattggtacgaagaccgataataccgcgcgaaggcatatcaaactcaatgtttacacggtcaccctgtgtttccatagaaactaaatcacctttacggcgggttaccatatcgatcattttactggaatattcttcgggtacgctgatcgttaattcttcgataggttcgcattttactccgtctatttctttgaagataacctgaggctggcccacttgtaattcgtatccttcgcggcgcatggtttcaatcaggacagaaagatgaagcacaccacgtcctgaaacaatccatttaccgtcctccaattcgcttttgcgtacacgcaatgccaggttcttatccaattctttggtcaagcggtcttggatgtggcgtgaagtcacaaacttaccttctttgccgaagaaaggagaatcgttgatagtgaataacatactcatggtcggttcgtcaatggcgatggggggcaatggttccggattttcgaaatcgcagatagtatcaccaatttcgaagccttctacacctactacagcacagatgtctcccgatgaaacggcatttgtctttttacgtcctaagccttcaaaagtatgtagctctttgattttagactttatcagactaccatcacgctttgctagtgtaatattcataccttctttcagcgtaccacgatgtacacgtcctacagcaatacgacctgtatatgctgaatagtctaaagaggtgattaacatttgaggagttccctccaactgtttcggtgccggaatatgctcaataatagcgtccaacaacggaaccaggttttctgtcggggttttccaatcagtactcatccaattatttttggcagaaccatagataacggggaaatccaactgatcttctgtagcattcaggctgaacatcaagtcgaataccatttcgtatacttcttccggacggcagttgggtttatccaccttgttcactacaactacaggtttcaaaccgatctgtaatgccttttgcaatacgaagcgtgtctgcggcatcgggccttcgaatgcgtctaccaataagatacatccatcagccatattgagtacacgttctacttcgccaccgaagtcggcgtgtcccggagtatcaataatattgatttttgttcctttgtagttaattgaaacgttctttgaaaggatagttatccctctttcgcgttccaagtcattattatccaataccagttcaccatttgtctggtcgttgcggaacaaatgtcccgccagcatcatcttgtccaccaaagtcgtttttccgtggtctacgtgggcgatgatcgcaatgtttctaatgtcttgcatactatacctatatatttggctgcaaaggtacgatttttaattcaaaaaatatttggctgttaacgattattttttatcttccgtatcttctttactattaaatgtagagggagtggtgccatagaaatcgacaaaatgctttctgaaggtggggatgtcattataaccaaccatttcggctacctcctgaacattgtatttgcggcttctcagtaattcggcagaacgttttaaccggactcctcttactaattctatgatagtgaaattagtgagttgttttacttttctgtaaagggtaggttgactcatgttcagcatttcggccagttttttcacattgaattccgggttttgcaggttctcatttacaatattcagaatttgtgtgatgaacgggtcttctatgatgattgtttccgtattctcttcttgcgagccgttgacggtgatggaaggcattagtagtttggtataaatccgtttcagttcagtccggctttttattaaacgttttactttagtgcggagaatctccggattgaacggcttcagaatatagtcatcagctcctaattctattcctttcactatattttcatcatctgtcaaagctgtcagcagaataatagggatatggcaagtttttagatcttctttcaggatacggcaacattcaaaaccgttcatgacaggcatcatgacatccgttattacaagatccggtatttctttacgtgccattcttactccttcttccccattttccgccataataatattataggtggcagaaaataatactctcagatagaggcggatatctgcatggtcctcaacaaccagtagtttgtatttggtttcggggttgtcaataggtttggcggttatactgtttgctatttcctgttgtcttttatcctctgcagtaatcattgctttatctgaatcttccattattgtttcgggttcgatgaaacatacgttttcatcatttttcaaatgttgtttacctagagggatataaagaacaactcgggttcctttgtttttttcttgagtgatttggatatcgccgtggtgggctagtattgtcgttttcataatttcaatgcctaattcgggatgtagccggttgcttggaggattgtaattgtccgatccaaggaagatgacagaggactcttctatcatttctttcccgtcatcctctatagtaaaaaggcagaaatcttttccgttgatagtactggtgtttacagtaaagtggatggaaccggaatacgagatatgccggtaggcattggataatatattgcttagaataaagattatctttttccggtcaatccatatttccgtatttattttgttgtctttgtcataatgcaggttaatgggactgacgttcagtagttcgtgagatgcacgcactacagtgtcggctatcacgctggcaggataaggggccacattcaatttaggactgtaactttcttgctgatgaatattcaatagctggttacaaatgtcttgcaggctgattgaattccgataggccatttttgctttttgcaggaatgattccgggaaggctgtattagtaatcatttcttttaacggagcggtgatgagtgataacggggtgcgtaattcctgtgccagcatatatctgatttggtcacgcaattgatggtttttctcttcttcttttcttatttccgtttcttcttccagcttttctttcagtttcacttctttggccttgtaaacttgccgtttctgtaatttccggttaaagtacatccatgtaagcaaagaaataatgataatagccaggatgtatgcagcgatggcccatccggttgcagcccaatatctatttacattgatagataaccgggttatttgtttattttcttccaacggataagacgagcgtatttccagtacatatttcccaggagggatattgctgagttttatatgatcgtcataattcgtattccatttttcttctgtgggtaacaggcgatatttcactgtgttgggcgaggttccgtatttcagatcacttaaatagagaatcaggttgttgttattgtagtctaaagataaatgttctatcaggtacgcaggtttgtccagaatgacttgtccgtttattttttctcctatttctactttattgtaattaatatctatatcggagatatggaattggcagttacttgaactttcttttaaagtgcgcggttcaaaatagagtaatcctgtagagttcgcccatagcaatttcccgtcattcagccgacatacatcgtaataactttccggtaatgcgtaggtatatgatgcattgttcttgttattcaatgtgataaaaccagcattgcttcccagccaggtatttccgttcttatcatctatcatacagcttatgtgtccgttaggcaagtctttttgtaagatcatgatagaggatatggttttctcttttccgtctatttggataattttatcagtgtatgagataagcaattggttatagttattcagataaagtgccaatacttttccgggtgtcaggtttcttgccttttcataaccaccggtgaattttatttgttttcctttacggctggcacggtgtattcctttttcagtacctagccacatggttccatctccatcttcacatatagcggttatttttttgaattctttcgtataaggttgtgctgctatgcattcgtgtgtctgatggttatagaccattattcctttttcggtggcaatccataaatggttttgtgagtttagatatagtttcaagatagaagcagttacagcagagtctgctgtttcggggtttagttggtgaatcaccgtttcaccggtagtaggatttacccaaaggatgtttcctttgtcatcgccgaaccataatcctccattgcgatctttgtgcaggcaataatgattattcttgtgacttttctcccataaggaaaagtgcagattaggagagatcttattttctgtacttttatatatgccatctttttcggtgaccagccagatgtatccgtcggcatcttgtgctatactattcacatatcttatttcatcgttcaacgggatacggttgatatcgtttcctttgagattcagtttcagcaatcctctgccgaaagttcctacccaaagcacattgttggacttgtcaaaatgaatgtcggtaattctgtttttgaggatgggggcatagtaagaatcatgttgggtcagatctacaatgtggaatggtgactggaggtagttgtccgtttcaaatcttatggctgacagtgaactccatgtggctataatgaatgtggtcttatctatttggattatatcgcgtatatctttttgaatgaaggatgactggctgttatcattcagtgtgcgtgatgttttagtgtttgtattataacagatgattccttcggtttggtcacaaatccacacattatcattatatatatgtattttttcaatgttgtcggctttcacaatacctagatcggttccatttatatgctcgctacttttatcggaaacgttataaagcaagatttgattctctgctgtcagtgcgcataaaatatcttcgttattataaagtcctaggacttttgtttttatatctataagcagttgggcagtcagtcttatttcatctgcatttttctccatatttaactctactatggcattggaggtcaaggcatataatttgtcttgcagtacacatatatcctgtatatcttgcaatacctcaggagtaggtgagataagtggcatatagattccacgcatcttgtcaaaacaggctatttggtttaaattggcgatatgagaccatagcagattgtttgatgtttcatataaatgagttaaggcacgtggctctttatcaatcagattgtaattatgaaaatgtattccgtcatagcggcttagtccaacatcggttcctaaccataaaaagccggctttatcctgataaattccagtcaatgtattgttgctcaatccgttttgtttggtaagtagttggataccacactggcggaaataactttgcgcattagtagttgatagacaaaaactacataataaggtgattattaaagatttcatcataataaattgtttcacttttattcccctgtaatcagattggtcacgtacaatctgcttgatattattccttaatctattttaggaattcctacaaatatagcaaactatattttcataaccaactaaaagtcataggaatatattctgtttttagtatcaacaggttcggtgaaaagaaaggatagtaggtattccgttcacacagttttgtcttgtcttgattattagacgattgtatttgaatgaaatacaccccctgtctcttgctattttattaaggtatgtataccaagctagaaacaaggggggaatgatggtatatattataaagtgattattgtattatatatcataaattgtaggaaaatgcagcatcatggtttcggggattatagttgccatttatagtgacaggaatctgcatatatttgattccattatctattactttcatataaatatagctttgggattcgaatttataattttttgtggcattatcggtagccaggctgaaacctttaagataccattttatcaaagaagaagaacattccgcctgatatccgccatagtagaggcttccgtcattgtaacagttcatatttaactggatagtgaaagcatatttatgatctattgtttgcttcattacaattctaagccatgtttgttctcctttggtggcagtttgaatatcaagttcttcttgagcatcagtatgttttcgtaggacagatagaatatggtcggcttcagaaaggctgatagccggtaactcacttaattttaacttgtcagaattgttttcctcgtatgtaacgcttctggctccatacgttttttccaggagatacgttgaaactgagttttcaacggggtcattaccatctgcagagcaggatgccaaactcatcatgacgagcatggcaattattaaatgcattgccttcatagaactataattttttattgtttttttgattatgtgaatgattgacccattatcatccgatacaaaagtaggtattcttttcatgtatccaaattattttcaagcttttttgatgaaaacaccctctttttgatgaaaatacctgctatgttggaaagaaggagttgtttggctatataagggggcgtttttatcatgatgaaaggattttcatttatggatggagaaaactccgttggtgttccatttgatagttggaatgtttctcattgaatggatgttctgtttttgacggaaataggaactaagattgttttttgttcattctgtattttgccgaaaccacctcttaataaagattaatttgccaatatcctgttaaaagaatagcctctacctttgtgatgtaaaaaataacttagctagagagaattgaatatggtaatacgaagatttttattttcatgggtgtgtctgctggcttcttccttatttatgtatggacaggtggctgttaagactaatgtggcgatagatgccgtcgccataccaaacttaggagtggaagtagggttgagcaagaagcttacagtggatattccgttttattataatccctggaaatacagcgataataaaatgttgaaactggtgatggtacagcccgagttgcgttattggctttgtgataagttcaatggtcattttttcggtttccatttaatgggaggagcatacaatactaccggtattgatttgccgttttctcctttcgatgatttgaaagacttccgttataagggacatttttatggcggaggtgtcagttacggttatcagtttgtgctgggacgccattggaatctgggcgccaccatcggtttgggttatgcttatgtgcgttataagaaatatgagtgtgaagaatgtggagatatgttggagaaatccaacaagaattattggggtcctactaaggctgctttgaatcttatttatatattctaaaaattacggattatgaaacttatatgttatatacttcttatattattgataccgactattccggtaggtgcacagacattatcaggtggtcaggtacaagtcagcaatcagtcaatcctgattagtgataatggacaggtgatgataggaatggatatcacgttgccggctgcaatggagctttcttccaactgtgtggcaactctgactccggttttgaagacacaggataacagttataacaggattttgcctgctatttgggtatatgggcgtatccgttccatcgtgcaacagcgtgaacgcagtattccgtcggatgcatataccattcttcgtcgtaagaatggaacggaacagactgtaaattattcagcccgtattccatacgagaaatggatgaatggtgcagaactggaactgcaggctgctatacgtggctgtgccgattgtcagaaagaagaaaacagtgcctttataactcgtgccaatttggaacgctatgtggtaaaacctgtcgtggcattcgtttctcctgctgtcgaggctgtgaagaatcgtgccgaggaaggacgtgcttatttggattttccggtaaatcagatgaagatttatcctgattatcgtcataatccatccgaactggctgctatcaaacatacggtggatgtagtgaaaaatgatgtcaatactaccattactgaaatagctattgtgggttatgcttctcctgagggcagatatgcggccaatgcgcgtttggctcaggggcgtgctgaggcattgaagagttatgtaatgaatgagtatggctttaaagcggatttgttcaaggtgaattctgtacccgaggactgggccggactgcgtgcgtatgtggctaagaatgatttaccgctgaaagaagagattttgtccataatagataagaatgagagcgattttgacgtgaaggaggaacgcattaaggccttggatggtggaaaggtatatgccgcattactacaggattgttatccggctttgcgtcactctgattacactgtacgttatgtagttcgcggatttgatgtggaagaggcaaaacagattataaagctccgtccccagcagttgagcttgcaggaaatgtttctggttgcccaaacatacgaaaaggggagtgacgagtttaacgaagtgttcgatgtggcagtgcgcatgtttcctgatgacccaacagcgaatataaacgctgccgctatcgaactccaacggggtgacttgcaacaggcggtacgttatttggacaaggccgatgcacaggcgagtgcgacgctgaacaacagaggcgtactgaaactgttgcaaggggacctcgactctgctgagaattatttcaaacaggcacaggccaaggattccgtcgaagccggagccaatttggaagaagtgaccaataaacgtaaggatgaagcaatctttgtaaaataagacatatagacaaacagtacaataaaagatgttagaagaaacttgttctttgcgaaaagcgcaaggtaaaatccggggtagtggagtctattcccggattttgaattaaagttcagcgcattagtgtcctcacagtgtttttaagttgaattttacataatctgtcggttgggggctttatggaatatgtcggaagtcgaagttccggcagtggcaaaaaagatcaagacgttttttaaaaagctcgccatctttttaaaaaagctcgccgtcttttttgaaaacgacttgatctttttaagaaatacccttgtctttgaacatgtagtatttatatacgtacgcataagcctatataattgtataggtctatggatatgtacgtatgtgaaggaatgtgtacttcttgatgagagaaacacttgctcactacatttttatgtttttacgggtgattcccactttagatttggcttccgcatatgttgatgagggcggcttttatggagggatattttgctgaaatgccacactgtccgatctgtttgatgtagtgaaaaaaaagtacatgttatccttgtttttttctcttcttttttaatggaaaaatgtaagaggtgattctttcaacgtgtagggtattttattcacgtatgatggaaatgccctgtaaaagacgatataaagtcattttgtcaaagataccaatctattttgtcgaaaataccgattaaggtttatacgattaaccacttacctttgctgtgttgacaaacaagaatggaaattacaaaaatagtttataatttaaaaacttaggattatgaagattaagggattattattaggaatgttggcatatgctgccatggtagcatgtacgaatgaggacattgtgaaaaacaatgtgaatcaaccagagaaagtgaagggtaacctttcattagtgataagttctacatcaaactcatcacgcgctgctgataatgaagaaagcggtgtaacggatccaggtatcgaaggtgaatcaactgtaacagatgccgttataattttaaatagactagatgaaaatggaaatcttactaaagaagaattcggtggttatttaacaaaggcacaattgaatgaaactacggctagtggagagaccatttataatcctttctttacattggcaaattctggatggtataaagtgcttgttgtgttaaatccgactgagtcaatagaagctattgccaacagccaacaatcgactgataagtctaagtatgaacaaattgcagaaagttcttatacaacaactggtgatataaccatagctgctgccggtcaatttatgatggtgaacaaaaaagagataaaggtagacgttttatccaacaactatgaagatccaacaataaaaaaagaggtagaggtggaacgtgttgtttcaaagataaattatgtaattgctaaaccaaataacttatatcctcttacagtacaaactactgattatgccattgcggaaactacaagtggttactatatatatcccgataataaagccgttcgtttgacaggtttgcataaggcaaagaatttggataatgataattctgatgtttggatacatgagggaacagatggaactgatagaagagcttttataaagacagaaaaaacttatggtcagacaggtgaacatatttttactcttcttgagccgttccccaaatttgaatattatactacatctactgatggtaagcttgactggacagtgaaactggataaatacgcgttggtgaatctttcaaattctgtgtatacggcaagacatttgacggatgcgagctgggaaaacttcaggactttaggcttgttaggtgtagacaatatggcctatatggttgatcctaattcaaagaataagaataatgtaacagattacgaccaagtttttggatcatatttctataacgcattgaaaaatgtaaatgcggataaagttgatgaggccagcgatgatagccaagtttatttccaagatcttcccactgctaatactgacattaacgataatgaacaggtaggtcatcgtttggcttattgtttagaaaatattgtgaaaaaagaaaagcaagtaccagctttagtgactggtattattttccgtggtcagattggcgatgaaacgggtgagcctgttggtaccatttataaatgcaataataaattttatacatctattgatgctgtaaaagctgataatggtgcagatgcatcttatgatacttatgaaaatggacattgctattattattcatctgaaatttgccacaataaaggagatcagtatatggataaggcaatcatgagaaataatatctatgtactgaaagttactggattcgagaatatcggtggtgcaacaataacaatagatcctagcggtgaagagagtgataataatttctatttgcaattgaatgctaagattattccttggattgtacgtttcaataacattgagttctaacaaacactatgacagacaggggaggattcatctccctcccctttatacctttctatattctaacattataaaatgaccaaaagcatgaaaacagtaaaaacattcgcccgacaattctccttcagcctgatgatggccatgacattgggaagtgccgttgtgtcgtgcgacagcatactcggtgaagaagaggtagattgctctgtagagtacagagtgaaattcaagtatgattataacatgaagtatgccgatgctttctcgcgcgaggtggggactgtgacactttatgcttttgacgataacggcaagttggtatatcagaagacagaagaaggcgatgtgctgggagaagaaggatataccatgaaagtggatttggaaccgggtgactatcatcttgtcacttgggcgggactgaatgatgaggcttcattctcagtgcctttggttacggcaggggaatcctcgctagatgaactgcaatgcaggatggatcgtctgtacagtcgtgcggctgatggaacggctgttgtgaacagtaaactttctgcgttgtggcacggtgaagtgaccaagcaatctttctcgcgggcagcaagctcgcaggtagtgactgtgccactggtgaagaacaccaacaccatacgcatcattctccagcaaatggacggagtgactgtggaggtagataaatttgaatttacgattacagacgacaacggtttgatgaactatgataataagctgctggaggacgaaacattaacatattatccctattaccgtatgcagggtggcacggatatgggaacacgtgccgatggagatgcagaggacagcaatatcagcgtagctattgcacagattaccgtagggcgtctggtggttgaaaataatccccgcctcaccataaccaacaaggaaacaggggagcctgtactttccataccattagtgaaatacttgctgcttactgaagcagaaggacatgagatgaccaatcaggagtatctggatcgccaggacgaatacaatatgactttctttttggacgagagcatgaagtggattaatactagcatcattatcaatgattgggtggtacgcttcaacgaactggacatgtaataacgaaactaaaaaagcaatctatgaaaagaggtttatcctatatagtgatggcggtgttctgcggactgtgcttctcgtcgtgtgcgaaggacgagttggcggcgaaggctgggggggacggaagagcgccggtacgtcttgcattgtctctttcggggaattcttccagaacggttgacgcgcccacagcagatggtaattgggattttaccactccggaacaggggactattgtggaaggcgatgtgtatgtactagtgattgatgcggttactcaaagactgaaatatttggtagaggatttgagagtgattaatgattatgccgaccaaaagatactggaagggactatgcagaggacgataggtaatgaacaggtacggttggtggttctcgccaatttgaatcagaaccaaattcagggagtcagtgagggaatgcaggcatatcttaatacgatggtaggcaatactgccgttgaaatctataataaattggtttataattacactggtccgaccccgtggaatctggccgaaaggcgtctgccgatgtgggggatcagtcccgctaccggtgtccctcctgcaggaccaagcttagagtgcaaactgtatagggcagtggctaaggtgagcctttgggtgaacgggaaacaagggcttcaagatacaaaaggcgattttactattaccggcatcacggtgaataacgctaatgataaagggtattgtgtgtcacaagctacgttgagccccgatgaaacaattcagtaccaaagtccttacgtaacagggttgtcgatgaagccgcagaactttgtttatacgggactgaatgtgacaatggcttatgaggatttgatttatttgccggaacaagaaaataacgacagccgggcagtatccttggatgtgacttacacatatggaggtgaaaccaagacaaaaacgatcgagttcagaaaagatggggttggagatcggtttgaggtggtgcgtaaccatgtgtatatatttaatataaaagtgaccgagactcctgctggaggcggtttgaagacggatgtggaaacttatgtggcagattgggatgaaatattgcttagtccgggctatgaataaacaaaaggaggaaaaatgaagacaataagactgataatgatgtttttcatcatttgtatgttgggtgcttgtacggcagaggagttagccggtccggagtccggagtggaggacgatgctcctgtggtcatagcaatatcaccagccgatattacttctgtgaacatgaacagcagggctgccggagataactccatattctccgttattgatgatgtgaatgtaaaagtgaattatggaggaaatacggtaaccgtctatctggttaagaatggggattcgttcgaagtttccggtagtgtggagaatggtagtgcagaggtcgtttcttctaaaacagcagatggaaaagtatatatccacatcaatgccaaacaaggtaaccaggctgtaagagtagaggttatcgctaattatggacgaaagattactttgtcattgtggcagagtgttaaagagagtttgattcagtggccggtggattttgatgaaacatccgtttgtctcctttacggtgcatccgagcagtttatctataccgagaatccgcatgagggggctcaaggtggtaataaaggttgctatttggctaaagtttctttgaaacgcccgtatgctatgattaaagtaaatatcaatacttccgggctggacaacgaagtgaccttgacgccccgatcagtacaattatgtaatgtgcctaagacttgtaccttggcttcggataatagtataacggattttacttcttttgacaaggaaggacagaagtatgacttcccatccggttcgttgcttacgggaccaagtggaaatggcgaaactcaagtgatgtccgagcgtctttatcagtttgagaataaacagacggttcatgcccaaaactgtacggatgcccaaaatggtaatgaaaaagccaaaaccccgaatcgtatcaaaaatacgatggaggcaggtaaagaagtgtatgctgcatttaccgactatacagacaatgagaacttgggtcgcagatgttcatacatccttgttacggcggattatgaatataaatcgagcagtgcacatgtaaagggaactattagttaccgactgtttttaggtaagaacatatcgtatgattttgatgtgaacagaaataccatttataatgttacgcttcatttgcgcggagcgggaggtgtgaaagaatcgggctgcatggatgagaacggtgtgatcaacatctcgggaaacacgaaggatgctcaatggagggtagacagcgaattgtctgacttgtttattcagttcaatgaagggcaagattataatattgacggacatttggtgaaaatcaaagtggtgagtaccgataggcagaaatggcaaatcaaagtggatgattttgatggcgtttctggagactattgggtgatgtttgagtctgatatgagttggattactcctagatatgatgaatacaatgtgatacaaaaggagggaacggcagagcttagaatgtatttaaagggatacgctgatcaaaaaacgatttgggagaaagaatggaactcagagaagccgtatcgttcgtgcaatatttatgtgcgtaaactggatgcgcaaaacaagcctgttgcgggcagcgaaatgaaatatcctatcaaacaatggtatcctatccagattacagaacaattgtatgttgacagaatagaccgttttgctgttggcggtctgccctggggagacaatgggtacacaacgaacctgacggacggacagaaaataataaaggagtattataagaagataaataaagaacattattccagtgacaatgatgaaagaagtgtaatggataatgcgataggtgtggcggttaattccagtggtagttctactcctgtcacatcgggtaatagctatacggttttttatcatttctctttgcccgcagaagcagagtggcagcaaataaatggggtgattaccagttccggtattaagtataataattggtcaggtgtgccttattggacagctacgacggagggaaatcagtcaaaagtatatattccggggcagggagtgtcagaaaacaggtcaagaaatgagtcgcatcgtttcaggctggtatggcgatataatagcttaggctattattaagtataaaggaggatgttatgagcaacctgttagaaatcatggacaagaaatcatgcggtaaatcggaaatttatatatccgaagaagacggacgttggtacgcttgctaccgttctgctcatttgttgaagaaacttaatgagacggtattgagaggtgttatgctggataaggtggaagtcgatttgaataagttactgaacggcccttggattgtggttctgtgctcggacaatgagatgatactgattaaaaacgagtaatctataaaattatgcgcgagataataatgatgttggaaagagaattaagcaatgatggcttgatatatatctatcgggaaagtgacggtaaatggtatgcctatgaacagtctgctttttatttgagccggatgatgcttgagctttctttagaccgttatgtgatggaaaatgctttgtggctggcaagggcggaaattgatgtaaaccggattccttgggataaagttatcagtcatagccaatccgaatatgtattgcactataccccttatgatgggttccatgagtggctggttgaaataaaatagcgatagtttaaaaagtgtccagtccgaaattcatgaagaaacggtttcggactgggcacttttattcatcggatgaaaagaaatcgggtttacaatttcattcaatgtcagttgggcagcctttgctatgatgttcgaagatatgctgaaagatgcgacagtaaaagagatagaagattatttttaaaataaatcgctctaattcattgtgatataaaagataatgtctatctttgcacccgctaaatgaaaattttatatatcaaaaaatctaagaattatgtatttagatgcagctaaaaaacaagaaatctttgaaaagtacggaaagtctaacactgatactggctcagctgaagcgcagatagctttgttttcataccgtatttctcacctgactgagcacctgaagctcaacagaaaagattatagcactgaaagagctttgacaactttggtaggtaaacgccgtgcgttgttgaactacctgaagaaccgtgatatcgaaagatatcgtgctattgttaaagcactaggattacgtaagtaattcaatctttattgaaaaggacttaaagaaaagccgctctctgaaaagaaagcggcttttctattttctgttattacgtttctactgttctgttgttgagaattactctttagtaggatagtacagattatcttttgtcatgtgctccaatacttcatgcagatatttggccgactcccatttggccataggcaggtcgtgaagcaagtagttaccgcaatctttaggggaggctcccggaacttcgccttcaaaatcggctacaaagcggaacgtttcctgcatcagttctacaatatcttccgattttaaatcgcctttcattaacaggtagttaccggtgaggcatcccatcggtccccagtagacaattttgtcagaccatatagggtggttacgcaggtaggtagcggctagatgctctatggtatgcaaggctccttgtcccaaagcaggttcccggttgggttctttcatgcggatgtcaaaggtggtgaccgtttcaccgcccacttcgtcttttctggatacatagataccgcgaagcaagcggatatggtcaatggtaaaactgggtattgttttcatattattcgtttttataaattagctggtaatgaggaaaggaaggtatgagtgacctcgaaggaacggtcggctatagtctcccaaaaatttgtgtattgttcccaatggttgtcggatcccggcgtatcgctgatgatacggaaactgatgaacggtaccttatatatataacagatttgggcgatggctcccgattccatatctactgccagcccttcgtggaacttttctttaatgtcgttcagttcggaacggtcggtgatgaatttgtctccgctgcatatcagacctccatgaatggcggtcggagtatccagtgacatggcgcaatcaaacaatgtggcattaccttcgaatcgggcgggaagtccttgtatctgtccgtacatattgccttctccacaccatacatcatgatatacaacttgtcggctcaccacaacatccattattttcaggcagctgtctatgcctcctgctacaccggtgctgatgacacagtcgggttggaaggtacggatcagttctacagtaccggcagcagcgttcactttacctattccgcatttcatcaggataatggtattatttctaatgctgccttcagtatattggaaaggaccttcggtgtattctttcttgttttcgagcagttgcgctacttgtttctgctcggaactcatggctgttataattcctattttcataattcaactttatttatggctgcaaatgtacgcattttatcagagtatatcgtatctttgcaacgttaataaacagatatacttatgaacttatttaaaagaatactacctgatatagtagtgattatcctttttgctgtcatctcattcgtctattttttcccggcagtgacagaagggcgtatcctttcacaacatgactctgtggcgggcattggtgccggtgaagaagcgaaagaatatctggaacgtacgggagagcgtacgcgctggactaattcgatttttggtggtatgcctacttatcagatggcacccagttatgattctacggataccctgaagggagtggagaagttatatcatttgtatctcccgaattatgtgtggtatgtatttgtcatgctgttgggcttttatatattattgcgtgcattcgatttctcggtctggctggcttcattgggggctgtgttgtgggcgttttcttcttattttttcatcattatagctgccggacacatctggaaatttgtaaccttggcttatattccacccactatagccggtatggtattggcttatagagggaaatacttgtcaggtggtttgctgacagcggtttttgttgctttgcaaatagtgtcgaaccatgtgcagatgagttattattttctttttgtcatgctctttatggcggttgcgttcggagtggatgcttggcagaagaaggaaatgccgcaatttctgaaagcaactggtgtgttgttgatggccggtattttgggagtttgtataaatctatctaacttatatcatacgtatgagtatagtaaggaaacgatgcgtggaaagagtgagctggtgaaaccggatagtcataatcagacaaaaagtggtctggaacgagattatatcactcagtggagctacggtatcggtgagactttctctttgcttgtccctaatgtgaaaggtggtgcttccgtacctttggcagctaacgaaaaggcgatggaaaaggcgaatcctatgtataatagtatctatagccagataggtcagtattggggtgagcaacccggtacatccggtcctgtatacgtgggggcgtttgtgatgtttctgtttgttcttgggctgtttatagtgaaaggtcctatgaaatgggcgcttttgagtgctacagttttgtctgtcctgctgtcatggggaaagaattttatgggattcactgatttctttttggattatatcccgatgtacgataaattccgtgcggtttcttctattttggtcattgctgagtttaccatacctttgttggcagtccttgctttaaaggaggtaatggcacgccctcagttggttaaggaacaggcccggtcgttttatatcagcctgggattgacaggtggcatcgctttattgtttgcattagctcccggtttctttttcccgtcgtatgtttcaagtatggaaatgcaggcattgcagggtattccggcagatcagctggctccgttacttgctaatctggaagaaatccgtcagagtatctttacttcggatgcatggcgcagtttctttgttattatgataggtacggcagttctttggttatatggcatgggcaaactaaaggcgaaggtgacgattctggcattggctgtcctctgtctggcagatatgtggagtgtgaacaaacgttatttgtatgatgaacaatttgtggagaaggtgcagcaggataattcctttaaaccgaccgaaacggataaggcaatattggccgataaaacgttggatttccgggtactgaacctagccggcaatacgtttaatgaaaatacgacttcttattggcataagagcatcggtggatatcatgccgccaagttgcgccgctatcaggaaatgatagaggagcatatcagcaccgagatgaatggcgtgttcaaggctgtttcggaggcgggaggcgatatgcagaaggtggctccgtccggttttcctgtgttgaatatgctgaatacccgttactttatttttccgctgcaagatggaaagactgtcccgatacagaatccttatacgctgggcaatgcttggtttgtaaacgaggtgcagtatgtggataatgccaatgaagagatagatgctttgcatcggatagatccggcaaaaacggctgtcgtagataaaaaattcagtgcggaggtaaaatcggcggctgaaacagatacactgggtacaatcaaactgactgcgtacgaacctaatgacttgaaatatgaggttaattcgaagacaggaggaacagtggttttctcggaaatttactatcctggttggcaggcatatattgatggtgtggaagcaccgcacggaagagcggattatattcttcgggcgatgaatgtgccggccggaaagcatgtagtggaatttaagttcgatccgaaatcgctgcatgttacggaaacggtggcttttgtggcgttgggtgtattgacctgtgtgctggtcttgttcttattcttgcaggtcagaagagcccgtaggaaaattgattaaggcccgtcgtaagccagactccggattatttgtaaagcaggcgcagaacgaaccataagtggtgtgtcactgtgcttgcccatccatagtgacggctcataatacggaagcgttctttcaaggaggctttatggttacgggtggtcattccttcattcaggtaatcaataagagtaagatgggtgttatggagtacatccgctttcttcatgatacggatacaccagtcaaaatctgccgagaaccgatatctcaggtcatatggttccaccagatcacggcgagcgaaaaaggcttgatggcagactagcattccttgcttgaagcttttccaggtaagcgttgcgggtgcggacaggcggcgcatatataaaaaatgcccttgactgtccacaatttctgtttctccatatagtactcccggcagggctgttccattgatggaatgtaccatttgcagcaaagtatcatcctcgtgcaggccgtcaccggcattcaagaaacaaagataatctccggttgccaattttattcctttgttcatggcatcgtataaaccttggtcgggttcactgataacagtggtgatatgttcctggtatttgtgaatgatatccagtgtttcatctgttgatcccccatctacaattatatactccagattcttataagtttgtgtaacaatactttgtatagtatcctccaatacttttgcggcgttgtaggtgacagtaataatagaaaacttgggatgaggatgatggttatgcatgattccctgtaatcttgttatagatttcaacatatttcttggcgatggtactttccgaatagctggatactgccttacggcaggcttcttcgctcagactttcatattctccttcggtcaatgcccagtgaattccgtttgccagatccttggaagactgatattcggcaacatagccgttgtgcaggtggtcaatcatttgtggaatacctcctacattgaaccctatgcacggaataccacaggccattgcctctacgatggtattgggtaggttgtcttgtaaagaaggtgtgacgtataagtcgactgcgttgtaaatatctaccagttctttctcgttgctgacataattcatcggatagatagggaaaggaaacagggaagcgtattgttcggcttggttgccaaaaaccactacacctaactctttactaaaatcaggatatgaggaagctatttgtttgcaagctgataccaaatagtctattccttttctcttgtctgtaatttttacggagccgaaaagcaataacttcttgtcttgcgggaggtggcatttttctctggcctgttttttatcacgaggtttgaacaggttggtgttgattgcattgggaatattggtaatggtctgacctttaatcagatcacttttcttagccaatgattctaaccagcggctacaagctacaaaggtgatttgtgctccttcaaacagttttttctttttctggaaagtacggtaggctatgtctttcctgcttcctttgtaaagttgtggacagttgtggcattgtgtggcatatttatcgcaatctcctgcatagtggcagataccggtaaaaggccacatatcatgcattgtccaaacgatgggcttgccggattggatgatacgccggatatctgtcagtgacaacataccttggttaatccaatgcagatgaatgacatcggcttgggtaaattcgggcaatgctgtgatattggtgccggtattcgctatgtcaacggcaaacaagttatgtttcttgaagtggttggcttgccagataacgacacgctcccagatgaattgccatactttccaccatgatttctttagttcaacgacacttatctggtcggtctgcttgtcgcgtacaagcatttttgtctttattccgttgttttttaaagcctccatgaggcggttggctgcaatggcggctccacctattcgctcagacgtattgatgataagtactctcatgtgcataaaagtttatgcaaatgtacgctttttaggggacatcttggatatttccagtaagctttctgctatttcacgggaaaagatttccaaattgaaacgtttttctgccagctttcgggcgttggcgcccattttttgggcttcttcgggatggtcggctatgcgatgaatggcattgatccacccttccacgtcatcataggctacggtaattcctatttcttctttgtctatatccatttcaaaattaggattacgtgagcaaatgacagggatgcctaatgcaaaggcctctaccagtgtggtaagacctacggtataaggaaaatccatgcagcagatgacaacacagctttttcgtgccactttctgtgccaacaagtatgggatgacaccgtccgtataatgtactcgtacagaatcgggcagacagaagctttcaataatctgttggtagtttacacttccattggtgggggctatgtacaagtccagttgttgatcggtggcgcagaaagcttgcagcattgtgtctacatcccggttttctttcccggtggagataaaaccttccggtttccgatccggcattgtttgtagaagatggtcatagaaagcgaggtccggcccccaatggataagctgaagcttttcttcgggagcttttccggttgctaatgagtctttaatcaattttttactgaacaggaacatatgatcaatgcccttataaaagaaacgtgagatgcgttctcttatttttctggatgaggtttttaaagcagtgtgatgccaaatgacaatgggcttgcggtagaggcctaatgctctgagtaggatgataagttccaacccacggaaagatgtaccgtagagcacttcgtatggctctttgcagcacagaatctctttagtggcatagagcattagtttcagacggctggggaaagctttgtatttatgcatcaccgaccggattccatatttttccagcaaaggaagtccgtagaggatatgtcccggaaacttataatctttccattcctcgtaactttcacgggttaatcgggtgtgataaaaataaatagtgagtggttttaccggtgttggtctcttttcagccatttgttaattctgttttttattgctttagtgatgatggaaaaattgccgtatcgcaggttcagaaatagttcttcaaaagaacgtcctatcttaatccagggatgtccccaccccataatgcggtagacagcttttttataagctacattctcaatgacataacgaggatgcttgagaggaaattctacttcataccgtttcatggtgaagatgcggcggtatcctttaggcagtgtatgcacagaaccggcaaaatgggtggaatctgccgtggctcccaagttgttaatcatgttgcgggtgggcacgatagccagtcccgagttgaaaagcatggaagcgtggaagatggtttcataataggctttgttgttttctttatggcgatggcacatatagataaagtctttacggaatttccgttctttcatgagctgttccagttgctgcatattgaatgtatcctccagaaaggtataatgctcgtcccattggtcgatgactcttttccagctggcccatccccagatggagaaggtggaggcgaagaaatagtcgtatggtacatccggagtgatctcttcgttattgaaaccggcaatcatggtgatgcgggtatcctgttcgtacctgtccagcatttctttgcagaaggtgaagaaagatacggaaggcacgtcgtcatcttccaatacgatgcatttgtcaaccatggaaaaggcccatttctgtgagatgtattccgaagggtcgcaaccataattcttttcctgatacttacgatgcacttcacattcccagtctatctggtccaccacttcgcggcatgcctttatgccgggcaggtcgcgttcgccacgcggcccgtcctgatagaggaagagcttggagggacgggctttcctgacttgttcaaacacttgcgacaattgttgcgggcggttgaagaacaatataagtacgggtacatctacaagggatggtttcatggttcaatctcctttatttgtaaaattcgagtttgttgtaatgtggatgtatattctctaaatccggtaattgcatataattaccgtatatcttccttagcacagcatctgtttggcgtggtacggggaacatttttccttcaaattccatttctgtcagtggaaaaatatcgtctgtatagcgcggtttgaaataggcggtgccaaaagaatggcgtaattcttttccggggaataacttggcaatgaaccttaggatgggaaaaccgatgcgggtattaaaatgataaattctacgaatccgtttgtataatgtgctttcttttatatttttattattcaactgattgtatatctgcccttgcatgtgtcctcctatccaagctagacaataagggatattttctaaaggaaaaatatcaatgtagataccggtataatggaaaatacggtcatatgaatttgtttcttccaaatgagaatccttatcacgtaatttgccgtatataaagatgtaattgggatctgtttcattagtttgcaatgcaagattgtccggaagttcttgaggaagaactttcagcagacgcaggtaatctgagcgaagcatttctatgtccagatcatcatcccagggaatgaaacctttgtgacgtgctgcacctattagagttccggaactgagccaatagggtatttggtgcttgcgacaaatcacatcaataacctccagaagctctaacatacgtagttgctggcgacggagaagggaaccatcggggttaaatcgctttcttagttcactatccatacattaattttttagtagtttataaaacaaatcagcgttgatgtaacctgtttttgacaggtcttttccttttaattctccttcatggatatattctttgtttaatacatcttgcccccatagcaatattttatcaatgtttggggtacaaatgtttaatacctctgctattgatttgattatcaataatccaaatggaaaatcctcagtgaaataccggcttttgaaatcaggcagaaatcctttttctgttttttccataggagctggaatatgtttgaaggcaatgatggagcgtatcttgcgggtaagtgaccttgcatcataactgtcataatattccaataaagtaggaattggctctattcggaccggcagtgctttcagaatttgttggaattcattgtcacaagcaatgaggagctccgaactttcttcatcccaactattatagaacccgggaatctcatgatatgcttttcctctactccaggtatggaaaagtgaataaagacgggctggatgaagcaatggattgctattggtcaggctggcttctagaaaatgatgaagcatacgcaccggcgtatctaacatttcttgaagagttcgtagtaaaatatcggattttgatatgtttacggtggctatttgtaattcctttttgtatcccaacaagagtgctttctggccataggtttgcacacgggcaatgaatggagcacgctggaatccgaagagtgaagctgttttgcctaatattctataagcggtaaagaaaaaaccggtacaactgactacacttcctatgcaagttttttcctgcaagaacggttgtatgtggagaagttcttcctcaatggcaaatccggggagacaaagcaatacgatatcagagtgtggaatgacttctgccgggttagccgtaacgcaggctaatgagccggagaatgtatttccccggcaatcttcaatgagtaatgatggattccattggtcgggatgccgggtgaggatggaaacattaaagcctttatgtgcagctactcctgcaatgacgtgccccagaccgccaccgccacaaatacagatattgatactcatgcttgcagtttttttaagttttcagccagataattgttgtcttcagtatcgcgtatggcgatacggatgtaattcctgccatcgaatcctgtcttggtactacaatcttttaacaagagattatgctccagcaataaagaaacgagtttggtggaactgaagcgggaagttacttcgcacaggaaataattggcttgtgaaggtatgacacgtaggaagtcaacctgttgcaatacctcgaaaaagcgttggcgctcggctatgaattttttacaggcattttgataatcattattatacttgctgtatatctgtaaatagaattcggcgaaggagtttatattccatatagccatgttttttcgtaaataggatattatctctttgtcggaagatgcggctatccccaagcgtaatcccggaactccataagatttggaaatacttttaatgactgtgaggtgtgggtatgtttccagaacttcattcttaagcagcgtattttcgacacttttttcgctgaagtcaacaaaagattcatccagtattaagtggatatttcgctgctgcgtccatgccagcaaatccataagttcgttgagggggatgaagttacctgatgggttatccggattgatcaagagtaaatggcggatatctttgtccgcataaaaaagcatcagttcttttgccgtataatgaaaatcggcattctgtggatagaatgcaatgatttcttctgattgtcggttgggatattcttcaaaagtgggataaattactcccattttgccatctgaatgttccatcagcgctttgatgatttcggcggctccgttgccaacaaccacataatcttgccggataccgaagttttttgccatgacaagtgtattcactcccatgccggaagggtattcacggagaagcacattaaaattagcctgtagttcttcacacattttttgtggtggaaaataggggtttactaaatagcagaaatctttcagctttgggaaacgccagtatccgccatatcttttttggtagcgttgtagctggtcctgttcggcaaaaatggtttcagcgatgtcaagatcttgtatatcatcaatctcataccagcgttctccttccaaagggagtcctttcagttcacatctctccagcagggtgattacccgtaatacctgttcgtaatattcgttattacccagggctttgctgtaggcttcaagaaatggcacataactgttgcggagaaactctttactgaatttatagatattgacggttttgtagtaatcgtcaatatctgcgtagcggaacgttttttttgagataaaatcaatgatgtcattttcagtattgagccgtaccatcgtgccgtccatccatggctcatatttagctacaagtgccagattgggataggggttatttaaaattttgtggaaaagtgtatcctcaaaaatcaaatcggattcaattaataaagtatcttgcttttgcaattcctctttagcaagatagagagaatagatattattggtcttattgtagacaggattgtaaatatattctatcggagtatttctactttgtttctctatgtgggtacgtaatttctctccctggtagcctatgactaaaatgatgcgttccagatttaatgaatctaactgtgagagcagacggtctatcagataggtcccgtttactttaatcatacacttggtgttatctttggtaagatctcccaagcgcttgcccatgccggcggctagaatgattgcttgcataataaatttaggtatatatattgcaaaagtagtaattaattagcatttataagcgatgttatttatatttgcctcaaattttaaacaggaatgggtaaaataacatttgtaccggtaggaggattggccaaccgtatgcgtgcagtggcttcggcggtaatgctggcaggaaagacgaaaagtgaattaagcatcatttggtttcgggattgggcactgaatgcaccgttttatcagttgtttaagcctgtagacagggaagtggcttgtttacgggatgcttcgcggttggattatgcattattagacagacctcgttccaagaattttcatttcccgcttttgtttcagaaactgcttttcaagtcttgtctgtacgagcgttccattactcctttatgtaaccggcattttgattttgaacggtgggttaaagaaggtggctgtgtttatatggcatcatacaccgctttccaactttatgattatgcgtggatcagtcggttgtttgttccggtagacgagattatggaagaggtagaaaaccgttgtcggaatttttcggatgctatgattggtgtgcatatccgtcgtacagataatctggcttctatcaggcaaagccctatcgagttgttctatcagaaattagatgagaagataaaagaggacggcaaggtggctatctatttggctacagattcggaagaggtgaagcgggaaatgaaagagcgttatggtgaccggatattctgttccggaaaaaaggcagaccgtggatctttggagggaataagggagggtatcacggatatgtacacattggctcgtacacaaaaaatatatggttcttttcagagttcattttcggatatggcagctcagataggaggggttccattggagattttgaaattatgagttacggaaataaatcattgttttaatgattatctgcaaacatttttatttttgctcctcttctttctatggcatttgccaatttgttttctatttttcctaatagcagccgtctgctccattctataacaagcgtcgtcagacagatagaaacaagtgttcccataaaatacagaacaagtaggttgctgtctgcataaggggtataccagggttgtaaacagtggataagaagtccttgaagcatatataaggcaaaaacgtatcctgctaggtaattgatgatgcgggatgaaaaatgccaccgggtaaactggtagaaaatcatgatagaggcgatgataatcagtagattattatctcgggcgaatctcagtatgatatttccactcattgctgtaagcagggtattcagtataaaaataccggcaaggctgcctgacaagatttcccggctatgtcgtttcatgttttccggaagaccataggtcttcagatattgtcctatgagataagctagtgtgacattgataattcccttgcccgtgtcattctgaatttcaaaaaacaggattgtcggggcaaatacaaaaaagaatccccatagtaacagtagttgtttataacttttttgtgagaggttatgaaccagtcggtttaaatagggcgagaaacaataaagtactacatagcaggtcataaaccagtattttttgctaagtatcggtagcaatgaggaggccagccctgtccaggtatgcggagtgtgaagccatattgtttcgatcagataagaaacgatggaataaaaccatacgacaaccagcattttgaaaaatttatgtgtattgaaacggattccaaaataacctgagatcagaatgaacaaggttactccggtgtttcccagtgtattgataaatagtatgaattctttgttcagccagttaccggtgtggaaggtatttcctagaatatgcatggatacaatcagtatgatactgataattcgtaaacattctaatccggagtgacgtgtagcatccattatttcttgattatatagtgtaaactctctttaaaagtgacggagccgctcaaccacagggtggctgtgtagagtgtgccggctatgatcattttgcttgccattaataaatacagattggcaaagccgatagtgatataataggtagccgccattactgcggtagctatgaaggcaaacggaaggatgtctttcagcgctgcaaacaagctgagccgtatttgtttccatacaaaatagtgccatacaaacagccagcagatattgatggatacatacactataatcatggtatgtacgccgtatggatagagcagaagcatggttgttaactggatgatgcctaagctgatggtattccacatatagatatccgattttcctttgctgatgactaggttggaatacaaattggttatgggaatgaatgcgccaccgatgcagagcaattgcagaatgaaggcactgggtagccatttgtctgtaatagtcagtataatcagttcgggtgcgattaatgataatcctaacatagccggaaaagaaataaaggcagtgaagcggagcatcttccggaaagcgcgttgttggcgttccctttcatccgacaaactggaaagtacaggttgggctacactgttgactgttcctgaaattaatgaatgtcccatataattccatttattagcttgagtaaaatagcctacttcttgtcccgaatagaatttaccaaggataacggtaaagatattattattgatgtggttgaatatattggttactaataatttgctgctgaaagaaagcatccctctcaaaggcttgaagtcgaaagtaagtgtaggtcgccagggtgagaagcaccaataacagatattaatggttcctacatagacaatgctttgtgtggctatcccccaataggcaaatcccaagcaggccatagttataccgatagttcctgaggcggttaatccgatagtgaccgccattgccttttgcttgaccattaagttgcggaacaggtaagcactgtgggcaatgcccaaactggctacaaagaaaccgaggaaagtgtatcgtgccaaagctgtcagttcgggagtgtgatagaattcggcaatgagtggggcgcaaaggaacagaatgaggtagagacaggcacttagcccggtactgaaccagaatacggcattatagtctttgtgggagatatcccgtttgttggctagggcggccgtgaacccgctttcctgcaaagagcctgcaataagggagaagatggacagcattcccaccatgccataatcttccgcattcagaatgcgtgacaggaatatcccgaaaaaaagattcagcagctgctgtactccattgcttaatccgccccagaagaggccttttgctgtcttttctttcaaggattgttctgccatttttatagatagattataaaacagtcaggctgaaagcggacgtttcagttgctttcagccttttctgtatttgggtgtatattatttcacttcactgcccggctttacctctcttaataaagaggtcaccgctaaggtgccgtcaaagttttcagcactcaggatcatgccttcgctcaccaatccgttcttgaattggcgcggagcaaggttggcaatgaataaaacttgtttgcccaccagttcttccggtttataatgttgtgcgataccgctgacgatggtacggttctccagtccgtcagcaatcttgaatttcagcagctttttcattttaggcactacctcacactctaatacggtacctacacggatatctaacttttcaaattcttcaaaagcaattaccggttttatcgggttagctttatagttggcagcctcgtttgctttttgggtagccaacagtttgtctacttgtgcttgaatggtttcatcttcgatcttttcgaacaacagttctgccttattcaattgatgtccttctgccagcagatcggtacgccccagttggtcccattcaaatgtttccatattcagcattttgcggagcttttcgctgctgaaaggcaggaaaggttcgaatgcaatagccagattggcaactagttgcaatgctatgttaaggatggtggctacacggtccatatcagtttttgccagtttccaaggctctgtatcggctaagtatttattaccgatacgtgccaggttcattgcctctttttgtgcatcgcggaatttgaatacatccagtagcttttctacttctgcctttacgtcagcaaattcttttagtgtttctttgtcgtagtcggtcaattcaccgcaaacgggaactttcccgtcgaaatatttatgagtcagcactaaagcacggtttacaaagttaccgtaaacagccaccaactcattgttgttacgtgcttgaaaatctttccaggtaaaatcgttgtcttttgtttcgggggcattggctgtcaatacatagcgcaatacatcctgtttgccggggaagtcctgcaaatattcatgcaaccatactgcccagttgcgtgaagtggaaatcttgtcaccttccagattcaggaattcattgctaggtacgttatccggtaagatatagcttccttccgctttcagcatagcagggaaaacaatgcagtggaatacaatattgtcttttccgatgaagtgaatcaaacgggtttctggatctttccaccaagtttcccagctgtcgggaagtaattcttttgtatttgaaatatagccgatgggggcatcgaaccatacataaagtacttttccctcagcaccttctacaggaacagggattccccaatccaagtcacggcttaccgcacggggttgcaagcccatatccaaccagcttttacattgtccgtatacattggggcgccattctttatgattttcaagaatccattcacgcagccatccttcgtgtttgtccaatggcagataccaatgtttggtttcacgcatcactggtttactgccactgatagcacttttcggattgatcaggtcggtcggagaaagtgatgttccgcacttctcgcattggtcaccgtaggctccttctgcatggcagtgaggacattcaccggtaatataacggtcggccaggaactgatgggcttcttcgtcgtaatattgcatggaggtcttttcaatgaactcacctttatcatacagggttttgaagaattcggaagccagttcgtggtgtgtctttgatgtagtacgagagtatatatcgaatgaaattccaaattctttgaatgattcttttatcaaggtatgatagcggtccaccacatcttgtggagtaataccttctttctttgcacgaatggtgataggtactccgtgttcgtcagagcctccgatgaaaagaacatcttcttttttcaggcggagatagcgcacgtagatatcagcaggaacatatacacctgccagatgaccaatatgtaccggaccgtttgcgtagggcaaagcggatgtgacggtggttcttttgaatttattttccattgtatgatgtcttttttgttatttctaccagtaacgtgcaaagttagtgatttttagtaagtatatggaataatcagaaatatttctcccttaaaatctctgacaggccgtacttattataaaatatggttattcgggggctttgtcggaagaagtgaaaatacagaaaaatgttatatcgtgatgcagtgatttgcacttatttgcatttaatcttaaggagagaaaaatgatgaactaaattttacttatcctgttttttataaaaccttaagtcgaacgagacatgaatacgtggtataaattcattttaaatgcacttttctctaaaaagagagaggataaagattgggaaacgaccgataaggaagaggatgttctttcaaattacattgaactggactcattgatgcaggtcatttatcatgcaaaggaaactgagtcgggcagctaaactaaccggcccagtcttctctatcaagatttctatagcttatcgcttctgccaggtggatggaagtaatgtgttcgctgttgtccagatcggcaatggtacgcgctacttttagaatacgcccgtatgcgcgcgccgacaggttgaggcgtgtcatggcagttcgtaataattttagccctgcttcattgggttgagcgtacagatggagtaacccggcttccatttgtgcgttgcagtaaatacccggatggttggcaaaacgttgagcttgtattttccgggccttgataacccgttcgcgtatgcttgcactactttccgcatgatggcgttctgccattttttcgaatggaaccggaactatttctatttggatatctatgcggtccagtaaaggaccggagatacggttcaggtaccgttgcacttgtccgggattacagacgcaagctcgtgtgggatgattataatatccgcatggacagggattcatactggctaccagcatgaaactggccggataatccagactgtatttagctcgtgcgatggatatatgcctgtcctctaggggttggcgaagtacttcaagtacacttctgttaaattccggcaactcgtctagaaagagcaaaccgttgtgagccagactgatttctcccggttggggattggtgccgccacctaccattgctacttgcgaaattgtatgatggggactacggaaaggccggatggcaatcagtgaactgtcttttcctaattttcctgctactgaatgtattttagtcgtttccagactttcacccaatgaaaggggagggagaatgcttggcatacactttgccatcatggacttcccacttccgggtgaaccgatcataatcaggttgtgtcctccggacgcggctacttccaatgcgcgttttacactttcttgtcctttcacatcagcaaaatcgtatggaaagctactttggtgttcatagaattcctcccgtgtattgacgatgctaggctccagattgcgttcattattgaaaaaatcgatgacctctttgatattttctacgccatatactttcaggttgtttactacagcagcttcccgcgcattttgtttgggaagtatgaagccttcaaaaccttgctcgcgggcactgatagctatggagagggctcctttgactggttgaaggcttccatccaggctaagttctccgataataagataacgtgaaagtttttcttccgatacgatttgggtagcggccaatattccgattgctagcggaaggtcgtatgcagacccctccttgcgtatgtcggcaggggccatattcactacaatttgacaagtggggaatttatatccgtttacctgtaaggcggaaataatacgttcatgactttctttcacggccgagtccggcagaccgacaaggaagaattttatacctcgtgaactatttacttcaatagttacaatggtagcgtcgataccttgaacggctgctccatagacttttaccagcattcttttattttttattttgtctctttcgagcacgttctgcctctttggcggctttttctttctctttatcttgttctgtcagctgtctcactttgtctatcagttctttgccccgtatatcttgtgtgatgacccgcttgtcaggacctatcagtatattggcaggaatccgggttatgccttgttgcttgacaatggaattgttccagcctttgaaatcgcaaacttgtttccattgcgtggtatctctttgaatgattttctccatccattcctttttatccagatcaagggagaggctgataataacaaacttgtcttttttcaatgccttttgtacggatactaaagaatcttgtgtggcaatgctttctttgttccagcttgcccaaaaatccaaaaggacatatttcccttttacactgttccagttgacggtctttccttttttatccgtgcacgaaatgttggaaacgtagcgatgttctgtcagttcttttttctcgcttaatttattctggagttctataatataaggtgtgtcttttataataccgcttagtccttttatcagctgatctatgtggttgtaatcaggaagcgagtcctgtacgtaatatttgtctatcagatagatattgctgtacgagcttgggttggttttaatcaacgaatccacagcagtcataacagctgccttgttattttctaaggtgctaaggtactggatatgttttgccagttgtgcgttttctccctttcctttaacctctatctttccggccattccgtttagggtaacactttctcctttatcagcatatatcggtaagatttgtttttctcccaatagtaatgagaagatagtaaatgtgtcaggggtaatggtgtaagtgaatttaccttttgagaggagtatggtatccagcttgtaatcgggttcttgataaaatactaatatagtgtctgaaggaagtcctttaatgcttccttccaaggtgaatgtatttttcttgccgcagccgcttgccagcacaacaagagtgaaaagaaagaatagtaattttttcatttcaagatattttttgcgaaaatacgcattttgtggctaaaggcaggcataaatgaaggttattttacataaaaagaccggaagcttcatcacgaagcctccggtttcagtcataatcatctaaaaaactagacaagatgatatctagttatattatttgatagcatcagcgtatttagcgaactcgcgatcgttagcagctttttcagccattgaaggatcttttgcgattgcgctcttgatgctgctgcttaccaatgaagcattgtttgtgcgagcaccaacgatagccatcaagtagtcagtcattgcatccggattcttgattgcagacaaagtagcttttgctttgttatagtctttagccaaaatctgagcttgagcggcactgttagtcttagcgtcaccgaatgagttgacagctctgtcatactggccttgtttgatatataagttacccaaagcttcgccggcagcgttagcacctgtagctttgcctaagtaagtttcggcagctgcaacattgcccttaaccaattcgcaaagaccaaggttagcgtttacttcaggagcgttagcgttcttagaagcagcttgtttgaagtagctttctgctttagcagcatcaccggcagcgaatgccaattcacccaagttattataagcacggaaatcgttcggataaagttgagttgtcttggtgaagatagcttctttgcgagcgttgtcgttagtcagggtagcagcgtacaataattcttctacactcaatactttaggatcagagttgaatgcttcgttgatttcgtcatcgctacgaccgatgatgtcatagttggcagttaaacgggcacgacgcaactgaggcaggatttcgtcagccaaagttttgtatacagaagagatattcttgatttcagcttctctttgttcaggatcattgtacatagaaagaacacgtaagatcaaatctttatcctgcaagtttgatttagataccagttcttggaagccttcccagtcttgtgcagtgtattttgcatccaggttagtatcaatcttgcccttcttcaactggcgttccatatatttttctgtgtttgcttcacggttttcagccaaaccggtgttcagttccacaccaccatcaggtgaagcgtatgcagaaatttcaatgttgttcagtttgtagttctttgtgtcggcattgatttcagccactttcttatggaattctttgatatcgtcagaattcaattcgctgttgcgcaagttggcttgctggatcaagaacatgatgttggcagtctgagcatctttaataatgcgttggaaagcatcgttagcgtatgatgcgttagagctggcagcagtaggcagttcagaagtcgcgataacgccatcagcgattttcacagaaggaatagtgtatgatttctttccttttgtaatcttgaaatcaagataaagttcagagtttgccatttcgggaacatagtcgaaagaagctttcatcgtgtagctgccacctgccttgtaagcgatagtctgattgtttccttctactttttctccttggaatacagcgggctggcctttagcttcgccgcctttccatctcagaacgggggtaacttcaacagttgcgttcttcttgaaatacttttcggggaatttaccattaattgtcacaggcactttaccaccgattgcttcaagcacttcagggttagttgtgaaatagtcagaagacaattctcccatcttgccgcatgatgataaggcaaggaccaataaagccactaagggcaaatacaactttttaatcatagttacttattaatttaacgtttgtaatgtaaaattcgctatagtacgtttttgtgcgtctctttggggacaaagataggaaaaactctattatatgctagcttcttagcctgcttttttttcaatttatcttaaaatattttagaatatagaacctttattatctttttctctgaatttgatgttacgggggtgatgttctatgatttcactgcgtagcatattacggtctatatgtgtataaatttctgttgtcccgatactttcatgtcccagcatacactgtatggcacgcaagttggcgcctccttccagcaaatgtgttgcaaaagaatggcggaatgtgtgaggactgattttttttttcagacctatccgggctgccagttctttgatgatatggaaaaccatgatgcgggagatgttcttcccgaaattgctgataaagacaaagtcttcaaatcccggctttattttcatcaggttacggtcggtgaagtagagcctgatttccttgatggcgcgcggtgaaataggaaccagccgctgtttgctaccttttccttccactttgatgaagccttcttcaaaataaagttcggataatttcaggttgcagagttcggaaacgcggagcccgcaactgtaaagcgtttccagtatggccctgttgcgctgtccctctttggtgctgcggtctatgcttcctatcagcaggtctatctcttctacagtcattacttcgggcagtttgaaacctgtctggggggattccagcaattctgtcgggtcggctttcaggtaatcttccataatgaggaaacggtagaaagagcggatgcccgacaagatgcgtgcctgcgaacgggggtggatgccgatatcatgtaatccggccgagaaatcttccagattttcaagccggacatccagaatgttgatgttttctaatgtaagataagccagtaacttgtccaggtcagtaagataagcatctaccgtattgtcagataacgatttctccaactttaaatattgtttgtatttcaccaatatcttgtctgttttctcggttcttttcatttcttttttctacctttgtacccaaattccctgcaaaggtagaaaaagttcagatatagtataaatatgaaaatacaaattattaatggacctaatatcaatttattaggcaaacgggaaccttccatttatggcgctgtttcatttgaagactatctggtggaattgcgccgtacttatccggacattgaaatagcgtattatcagtcgaatgtggaaggtgagatgatcaacaaaatacacgaagtgggttttgattatgacggcatcgtgttgaatgcaggggcttatacgcatacttccattgctttgcaggatgctatccgcgccgtgacagctcccgtggttgaggtgcacatctcgaatgtacatacccgtgaggagtttcgccataagtcgatgatttcctgtgcttgtgcgggggtgatttgtgggttcgggcttcattcatatcgtttggcgattgaggctttgttaatgagaaaataaaacgtttaggtataatataaggtgataagattatgatgttgaaacaaacaaaaatcgtagcgtccatctcagatcagcgttgcgaggtagagtttataagagatcttttcaaggccggtatgaatgtggtccgtatgaatacggctcacgcatcgcgtgaaggttttgaaaaattgataaccaatgtacgtgaggtttccaaccgtattgccatattgatggacacaaaagggcccgaagtgcgtactactgctattgcgggcggcgagcctattccttatcagattggtgacaaagtgaagattgtaggcaatcctgcacaagaaacgacccgtgaatgtattgctgtatcttatcccggttttgtgcatgatctccaggtggatggcgatattctgattgatgatggtgatctggagctgcgtgtgattgagaagacagacgagtatttgttgtgtgaggtgcagaatgaagctactttgggtaaccgtaagagtgtaaatgtaccgggcgtgcgcatcaatctcccttctttgacagaaaaggaccgtaacaatatactgtatgctattgaaaaggacattgatttcatagcacattcgtttgttcgtaataagcaggatgtgctggatatccgtcagatactggatgcatacggcagcgacattaagattatcgccaagatcgaaaatcaggaaggagtggacaatattgatgaaatattggaagtggccgacggagtcatggtggctcgtggtgacttgggcattgaggttcctcaggaacgaattcccggcattcagcgtctgttgatcaaaaaatgtattctggcaaagaaaccggtgattgttgctacccagatgttgcataccatgattaataatccgcgtcctacccgtgctgaagtgaccgatattgccaatgctatttactaccgcacggatgcattgatgctgagtggggaaacggcatacggcaagtatccggtggaagccgtgaagacgatggccaagattgcagcgcaggccgagaaagataaactggccgagaatgacatccgtattcctttggatgaaaactccaatgatgtaaccgctttcctggcaaaacaggcagtaaaggctaccagcaaactgaatatccgcgccattattaccgacagtttcagcgggcgtaccgcacgtaatattgctgctttccgtggcaaatatcctgtattggccatctgttataaagaaaagacgatgcgtcatctggctttgtcatatggggtggaagctatctatatgcccgaaaaggctaacggacaggcatattatttcgctgctttgcgtaaattgctggatgatggtgtcttgagtgaaagcgacatggtggcttacctgagcagcggcaagcaaggtactcagacttctttccttgaaatcaatgtagtgggagatgtgttgaagtatgctatggactatgtgctgcccaaccgcaaccgttacctataataatagaagataggaatgaaagaaacggacgctattgacgaatatatccttcagcacattgatgaagaaagtgattatctgaaggcactttatcgcgatacgcacgtcaagcttttacgtccccgtatggcttccggccacttgcagggacgtatgctgaaaatgtttgtgcaaatgatacgcccccgtcaggtgctggaaatcgggacttacagtggctactccgcactttgcctggccgaagggttggaagagggggccacgttgcacacatttgagataaacgatgagcaggaggactttacacgtccctggctggaaggttcgccttacgccggcaagattaaattttatataggtgatgcgctgaagttgctgcctggcatgaacattacctttgatttggcgtttgtagacggtgataagcggaagtatattgaatattacgaaatggtactggagaaattatcacccggcggatacatcattgccgataacacattgtgggacggacatgtattggaggaaccgcatcatacagatcttcagactattggaataaagaaatttaatgatttggtagctgccgacaaacgggttgaaaaggtgattcttcccttgcgcgacgggctgacaatcataagaaaatgttgaataatgtgccaataggttatgctatgaaccgtatggcatattaacaaattagcaaactgaataattattaattatggaaacgaccagacaaaataagatttctcgtttgatccaaaaggagttgagtgagattttcctgcttcagaccaagtccatgaatggtgttttggtgtcggtaagtgctgtccgcatcagtcccgatatgagtattgcacgtgtctatctcagcgtgttcccttctgagaggagccaggaaatagtaaagaatatcaatgataatatgaaatccatccgttatgaattaggaacacgggtacgccatcagttgcgcatcattcccgagttgaaattctttgtggatgattcattggattatgccgaacgtatagacgaattgttgaaaaagtagaaccgggcggtgaattttcccttttatatagcgaagcgttatcttttttccaagaagtcgcacaatgccattaatgtcatttcagccatttccgtctgcggagtggctttggctacattggcattggtatgtactttgtctgtttttaacggcttccaggatctggtggctactttctttacggcttttgatccggagctgaaaattacggctgtcaccggaaaggtctttgacggacaggaagcgcgtatagaagctttgcgccggatgccggagatcgctgttttttctgagtccttggaagagaatgcgatggttcagtataagggccgtcagactatggcggtgatcaagggaattgaggataatttcgaggatctgaccgctattgacagtattcttttcggccgggggcaattcgtgttgcatgatgaagtggtggattatgccattcccggcatagaattggtttccatcttgggaacgggtatcaaattcctcgatccgctagagatttatgctcccaaacggggagctaaagtcaatatggccaatccagcttccagctttaactctgccgatttatattccagcggccttgtgtttgcggtgaaccaacagaagtatgactcttcttacattttgacttccctccaatttgcccgtaggttgttccagtatgacacagaagtgagttcggtagaattgaaattgaagccggatgcagatgtagggagtgtaaaatcgaagatacagaaaatattgggagatggtttccgggtgcaggaccggtatgagcagcaagcggatactttccgcattatggagatagagaagctgatatcttatattttccttacctttatcctgatgatagcttgctttaatgtaataggctccttgtccatgctgattatagataagaaggcagatgtagtgacattgcgcaatttgggggccagcgacaagctgatcacgcgtatattcctgttcgaggggcgtatgatttcactgataggtgcggtggttggtgtgatactggggctgatcctttgctttatccagcaggaattcggattgctttcgctgggaggtggtaattccggcggtaattttgtggtggatgcctatcccgtcagtgtccatgtatgggatattgttatagtctttgccactgtgctggtggtgggctttctttccgtgtggtatcccgtgcgttatctcagccgcaggttgctgggcaggtaatttatttattattgttgatacggctgatgtttgtcggtttgtacggtacggcttggctgctttctttgtttttattcttttcgtcttttggccttatggctttatctggttaagtcttttcttctttgtggttaaccttgttttaccttatggttaagctcttttttatggttgtgtactatagtctcttgcggtggtttgtacagtctgatatagtggactgtataaactcttgcagtagactgtacagtccactgccggagtctgtagtagttaactgtatgataagggttagctataaggaaaaacgaccttaatcgtcggagcaatagggcttggtacaagcttctttccagggcgtttcagatcttctactttcagggtcctcaaatcaattcgtagctgctcacctgaataggcatatccagattatgcagcaccttctccagcaaaatgccttcccgattatcatattcatagccgaaagtggcgcggatgccttgaaggataaactgtgtggcgcggtccaaggcgataggaagactgtcgccttgtatcagtgagccggttatcacactggtaaatgtatcgcctgtgccgggatagtgtgcgggcaggtagggacacgttactttccaatagcggtttccctgtctgtcataggcgtaaacggaagttttgcgaggatctccctgtacgggcacgctggtgataataacgataccggggccgtgctccgaaatttcatgcaggtaagcttttagttcttcgtctgtattctccgctttatagggtttgtccagcaaatagaacagttcggtcatattgggcgtgatgacatctgctttccggatgaggtgacgcatttccagaatcatttgttcgtcaaaattggtatatagctttccgttgtctcctaatacgggatctatcatgaccaggctgtcggactggcggaaatcatcaatgaacccggatacgatttgtatctggcggggagatcccaagtagcctgtataaatagcatcgaattgtacgccaagttgtttccattcactgataatcttgggcatctcgtccgtgaggtccaaaaaagagaagtgcgggtattgggtgtggctcgataatacggctgtgggcagagggcagacttgaaagcccatggatgagaggatagggataacgacggtgagggatacgcgccctgcaccggacagatcgtgtaccgcagctatcttctttactttatttgtatacatatctttatgaattaagcgttatggatggtatatataacaggtaaaccggaagaaagttattccaatgctatgctttttacctttatgtcttgccggcccaagaagatggaagcggattcctcaaacttgttttcgctttctgtggtgaggaagcggcagtttcctcctttatcgcagcgtgcgtccatttccggatggcggtttaaatagtctcgcaggctccgggccacatattccccttgtgaaatgatgcggataggttcaggcgtaaattgccttattttatccagtagcagcggataatgggtacatcccaatataatggtgtcaatcatcggatctttatccagcagccggttgatatgttgtttgacgaaatagtcggctccttccgattgatattcattattctctaccaaggagacccacatgggacaggcttctcctgttaccacaatgtcgggagataacttatgtatttccaaaagataggattcggatttgatggtaccggctgtggccagtatacctacgtgccggcttcgggtgatttctcctatacattctgctgtaggccggatgacaccgagtactctgcgggtagcgtctattaccggaagattgatctgctggatggtgcgtaaggcttttgccgatgctgtgttgcatgccaatatcaccaaaggacatcccagttcaaacagtttgcttacggcttgcagggtaaattcgtaaacaacttcaaaagagcgcggtccgtacggacagcgtgcgctgtctcccaaatagatataatcatactcaggcatcagtccgcgtattttgtccagaatggtcagaccgccgtagccggagtcgaatacaccgatgggaccggttgaagggaggatagatgggatcatggcagtatagctatataatacaggcacggattacacggatgttcacggttctgaaacctgtgaaatctgtgtaatccgtgcctgtaaaggtccttaacttaattatttgattcctactttagctttgacagcagcagttacatctgtagactgcgcttcatttacgtagggaatttctgttctgttcaaatcgaagatataagtatatccaccttcctggcctactgctttgatggcgtcttcaattttcttgtagataggttccatcatatcagcgtatgatttctgcaactgttgttgtgcatcttgttggaactgcattcctttttcctgtaattcctgcaattctttctggcgtctttcctgaatgttcttaggaaggttggcttgttcctgttgatattcagtatattttttggtcagttcatcagttgcacgtttcatttcatcctcgtattgtttctgcatggcttggatgtcggtctgggcctttgtgaattccggcatgacagtaagtacatctgcggatttaatatgcccgaatttctgagcaaatacactcatcggagcgataagtaaaagtagtaaagcaatttttttcaacatagttctattttttattagttattgcaaatttggattatcggttgcaaatgtaggaaattaatttgaatatcctaatcttgagagcacttcattgctgatatcaatgcttggagatgcgaaaataatgctttgggcggagcctctgtccactactgccgcatatcctttttgctctgaaatctgttttaccgcttcatagattttatcttgaattggtgtgatcaatgcctcttgttttttggccatttctccttcgggaccgaaatatttctttctcagttcggctgcttccttttcttttgctacaatcgcttcttctctttgcgttttctgtgcggccgacagggaagccgaggctttctggtattctttataaagtgcttccgcttcttttgcttttgcttccacctcactttgatattgttgtgaagcttgattcagttgggtattcgcctgttcgtatgcaggaatattcttcaggatatattccatatcaatcaaggcgaacttttgagcgctggctgtgaatacacaagccacaaacaatagagataataggatagcctttttcataatcacattgtttttagttattaaaactcttgtcccaggataaagtggaactggcttccactatactggctggatccgttaatcttgtcgaaaccgtatgcccagtcaatacccatcataccaatcatcggcaggaagatacggacaccgacacctgccgagcgtttcaactggaacggattgaatttgcttacatctgtccatgcgttacctccttcaatgaagcctagtgcatagatactggtcgaattttccagcatcaacgggtatcttaattctgcacctaaacgtacgtaagcatagccttcactaccataaggagtcaatgaaccgttttcgtaaccacgcagtgcaatggtttcggaagcgtagctggtgctatagcctgtcataccgtcaccacccatatagaatgtttcaaaaggtgatttcttgtacttgttatagtgacccagcaaaccgaactctgcacgtgtcatgataaccggacatttctgacctcctgtaagagcggtataggtctttgatttgaatttccatttgtggtattcaatccagttgaacatacttgccgcttcatcataatcatctttaccgtataccgagtagtccttgttactgaacaatgagtacggaggagtcagctgtacggaagccgagaattcagaaccgcgacgcgggaaaatcgggttatccgtagagttacgtgccaaagtcagattcaaactcaggttgttgcaattaccggttgacatgtattctccgttgttcaacttgatatacaagtagctccagtctttcaaaataaagcgctggtaagaaagttcggctgacaaggtaaaatagtcatccggccatctcaaacgcttaccccaaccgatagatgctccatacatctggatagatttatcggggtcataaaaagactcgtagttgttattatatccgccataataatttccataaccgctgtaataattgtagtaattattcatataagctgagttatagtagttactgctgatatctgtctgtatggagtagaaagccgaaacagagaatgaattcggacgttttccgccaaaccatgggtcaaagaacgatacactatatgactggtaataactaccgttggtctgtccgctgatggttaatgtctgtccatcaccctgtggcaggaatccgcggtagttgtcactcttatggaacaagttggccatagagaagttcgtgaacttcaaacttaatttaccgataacaccggtttgtccccaacctgccgagaattctacctggtcgtttgctttggactccaggttccagttgatgtctaccgtaccgttggtcgggtccggttgtacatccggctggatattttcagggttgaagtgtcccatttgggctatctcacgataagaacgttccaatgcttctttgctgaacagatctcccggcttggttcttaactcacggcgtactacgttttcatacaaacggtcgttaccgttgatacgcactttgctgatagaggcctgaggaccttcctgaatacgcatttccaaatcaatggagtcgccgtctatgtttacttctacggggtcaaggttatagaaaacgtatcctttattatagtagtagttaccgatagcatcttcatcaccggtcagacgctcggtcattaatttctggttataaacatctccctttttcatacggagctgttcgttcagccagtccgaagcataaatggtgttacctacccaggtcacgttgcgcagatagtatttgtcaccttcttctattttcatgtacacgtcgacggtacggtcatcgtacggagaaacactgtccacaacaatttgtgcgtcgcggtaacctaattcgttgtatttgtcgatgatatgctgtttgtcttcttcgtatttctcttcaatgaattttttggtacggaaaaggttgacaagtttgtttttctcattcgtcttcttcatgacgcgttttaacttcttgtcacttaacacggtgttgccgtcaatggtgatcttgtggactttcaccttttctttcttgtcaatcatcacatcaacatccacttggtccttattgtcagccaaatcacgctctacgatggtcacttcggcgtttttaaaacctttttcatcgaaatgtttcttgattaatattttagcacggtctatcaagttgggagtaatctggcttccttttaccaaacctagtttggcttccaaatcttcacgctcgcttttctttacgccgtggtaacgaatgtcggcaatacgtggacgttgggtcaggatgatttttaaatagatcttgtctccaacaattttttcagctaggatttgtacatccgagaacagtccgtgtcgccaataacgttttacagctgtggtgatgtcatctcccggaacaacaatggtctgtcctaccgatagtcctgaaagtccgatcaatacataatcttcatagttttttacgccttctactttgattccgccgatttcatacttcttgggcgttccggaataaagtatgactggattgtcgttttcttctacgtttgcttcttgggcgtaactgcctgttgaaaagcaaaataggcatgtaagcgttaatagtataagtgaaatacgatatagcattttatctaactttatatttgttcactggttttgccgaaacggcgttctcttttctgataatcataaatggctttgcaaaattcttcttcgcggaagtccggccagaacgtttcacaaaaatatagttcggaataagcacattgccaaagcagatagttgctaaggcggatttctcctccggtacgtataagcaaatccgggtcgggcatatagtttgtacttaaatgtgcacttatcaaattgtcatcgatgtcctcaatggctagtttgtcgttttgaatcttggccgctatttgtcttaccgcttctgttatttcccatttggaagagtagcttaaagcaagtgtcagacacataccggtattgattgaggtgcgttcaatgcattggttcaatcgttccagaacttctaccggtaactttgccgtatcaccgataatgcgaaaactgatgttgtttttcatgaaagtttcttcttcaatggagtccatcagaagactcatcagagcagcgacttcatctaccgggcgattccagttttcggtagagaaagtatatagtgtcaagtatttgactcccagtctagccgcttcttctgctatgatgtgtacagtttctgcaccggcttgatgtccgaagctgcgcgcctgtccacgttgtttagcccatcttccatttccatccattataatggctacatgggcaggtatacggcttttgtctatttgctctctatatggcatgtcgcaatctattttatatgactctctttgactttattccttggaatcgaatcccaacttattgattcgtcctctccatacttctccgcttcggctccatataatccacaagaagttattcttgtctacgacataagaatagttgccgtctgcctggttgtatagatctgtgaattctgtagggaagaatacatatcttgaaacaggtttccatgtaatgccttgatccgttgacccgtagaatcggctgaaagcgggaatgtccttaccgaaacttttacccggaccaccgaaagcgtataattggtcgttataatgaatcatggctatattagccagcttgggacaataaaaactatcgtatgcggctgtaggataatctgcccaactgtcttctgtagtcagtctggtccatacagtagaggtcgtgtcggtcgcaatgggattttctcccattagtaccatacggtctatgaatttattggttaccaacgggtaagctgtgtatgataactgatttttcgggaaattggccggaacctcgccattagtatcccaaaccagagcatccgtgctttccataaaatgattgttggtgtctatggcgtacaatttgcagttatgttctgaatgaacaccggcaatcagcttctcgaatttggtgttagtgcccatcttgctccagctttttccgtcagaggagcagtacaggtcattgtcggcaagtatgtataattggtttccccatgccatgacagaagaatagtccgcattttgcatattttcaggtaaagcctgtaagggcgtccaggtttttccgtcattgatgtgggtgcttgtaacagcggtgccattgtcttgctgtgcgaaaacataaatataatcccctaatgtgactgctttctgtgcttggatagtgttgtcgaaactacttcctctatggctccactgcaatgagtcgggaacttgtttatgtacattaatctcggctttataaataggtccatagactccgctcatcgccataactttaaattggacaggcttttcgaaattcaaggagtcggtatcattccacaacgaatctttgtcctcagcgacaataaaaatgccaataccgtctgattttatgctgactacgactttgctgatgtctgtaccgactggcagggagtctacgttgtagatatgtcttgtgccttggtcgatggcaaaagggtatttggtaccatcaacggtgaatgtcagcgttgtgtctttgccattaaccttttcggtatattgagtttcaattttatcttttatagcaaaagaggtaatgcttgattctgaactatattctgtttctacttcgttgtcgtccaagcaagatgtaatcataaaagccgcagcaagcagacttgtgatgacagtcaaaaactttattttcatttgcaaatgagtctattgttacaagtcgcaaaagtaggaagatttttttctatatagaagttttgggacaagttttatattaatttatagataaaccagccctttttctcggtcaatcagccacattttatctttgaatttgtgaatggacggcatgcattatttctcttccaaagtatattttattcagtttaaagtgttttttttgaatagaaggtgcctgtattccattgtttaagcgtagtggagccttttctatgaaggcttcatcccataagccggagtctatgaaagactgtaataaaatacttccgccttctactaggagtgattgtatttttttctgatataatacttccattatttgcggcaggatatctttgttgaaatccaacgatatgtattctgttaatgcgtttggctgacagggggattcccgggtaaacacgaatgtctttattttgccgttgaaaagttccaaatctcggggtaatgtcaattctttgtctattaccagacgcacgggatgcttgccgtaccaattccgggtggatagggagggattgtcaagtaatgccgtgtgtcgtcctactaatatagcgtcatgttcagcgcgttttttgtgtaccagcatgctggtcagcggattggaaagtatgatcggctttcctcctgtgcggtttatatcgataaagccatcagcggattctgcccactttaaggttatgtatgggcgtttgagcgtgttgaatgttatgaagcgtcttatcaggtgccggcattcctcttctaagacgcctacggttacttcaatgccggctttgcgcagtttctcgatgcctttgccggctacttgggaatacgggtctatgcagcctattacgactttggggattctcttctctataatcaggtcggcgcagggaggggtctttccataatgggagcatggttccagacttacgtatatggttgattccttcaaaagattttcgtctttaacggaacgtatggcgtttacttcggcatgtgcctctccgcaacggatgtggtagccttctccaataatggtgtcgtgatatacaatgacagcacctaccatcggattaggggctgtgttacaaagtccgttgtatgccagttgcaggcaacgggaaatatatttttcatcttttgtcataacgatcttgtttaaattcttacttttgcatataaaatgacactatgaatcctgttgtatcttacataaaacaaaccttgcagggatattaccctgattcagaacttgtgcctatggctaaattgctgcttacacaagtcttcggcatgtctgttgttgaattgtatgcaggcaaagatactactttttcggtgaatgagcggaaacagctggatgatattctggttcgtctgcaaaaactggaacctattcaatacataataggtacggaagaattttatggccttacttttgaagtgaataaacatgtattgattccacgtccggaaacaggggagttggtagactggattatacgggagcataagtatggtcgggttagaatattggatattggtacggggagcggctgcatcgctgtctctttggctaagaatttggaagaggcggaggtcgtttcatgggatgtttcagaaaaggcgttgcaagttgcggaacgtaattgcaggcggaacggcgttcgtgtaattcttgagcaaagggatgtgctgcttgcttctcctgcaggtgagcggtttgatgtcattgtcagcaatccaccttatattacagaaaaggagagggcggatatgagtgctaatgtcttggaatgggagccggaattggctttgtttgtgccggatgatagtccgttgctgttttatcggaaaatagcagaattgggtagggatatgctagtgtctggtggaaggctttattttgaaattaatcaggaatacggtcgggaaacggtggatatgttggctggtttggaatacaaaaatatagaattgagaaaagatctctttcaaaatgatagaatgataaaagcggagaaataagatgaagggagaattaagtgagaatgatttgaagtataaggcagaagcttattgctcttcaatggagcgttgtgtagcagatgtagaggctaaattatcacaatggggagccactccggaaatgatggagaaaatcgttcggcatttgcaggatgagagatacattgaccagaagcgtttttgctcggcttttgttcgcgataaatatcgctttaaccaatggggcagagtgaaaatctgccaggctttgcgcatgaagaaaatccctgcggatgttatagccaaaggattggaggaagtagatgagcgggaatatatggagatactatctggtttgatcgagcagaaaagaagaagtgtgaaagcatgtacggaatacgaacggaatgggaaattgattcgttttgcagttggtagaggatttgaaatggaggctgtttgccgttgtgtgaaacaaaccggagaagatgatgtctatctggactgatctttggaatttatttttccctcatagttgtctgctttgtgggcggcagcttatatcaggggagagagtgctttgcttgaaatgcttgtcggggcttccgcgtactcaatttcatttacggaaagataatattgtagaatgtaatttctggggaaaaataccggtggagcatgccacctcttttctttattatgcaaagggaggaaatgtccgacagttgttgtacgaactgaaatatcatggtaatcaagaagtgggtgaagtgatggggcggatgatggcatctgaacttatgtgttctcatttttttgatgggatagatttgattgttcctgttccgttacatcaacgtaaaaaacgtttaagggggtataaccaaagcgaatgcctggcaagaggagtttcggtggtgacaggtattcctatggatactaaagttgtgataagaagcaggtatactgacacacagacgcataaaggacaatatgcaagatgggaaaacgtgcgaaatttgtttgcctgtattttccctggcagcttggaaggaaagcatcttttgttggtggatgatgtgctgacaacaggggctacggttgtttcttgcgctgatgcctttcgtggcatacccggattacgtatcagtgtgcttactttggcattggcaggggaatcctgataacaacaactattttttagaaaaataccttgtccgatttttcattatctcgatgtatttctatatttttgcacaatatttatcagatatagttgagttatgaagactttagaaaaattattcgcagagaaattactgaagattaaggctatcaagttgcagccggctaatccttttacttgggcgtccggttggaagtcgcctttttattgtgataaccgcaaaactctttcgtatccttctcttcgtaattttgtgaaacttgagattagccgtattgtcctggagaagttcggtcaggtagatgctattgccggtgtggcgacaggggctattcctcaaggagctttggtggctgaagagttgaatctgccgtttgtgtatgttcgttctactccgaaagaccatggcttggaaaacctgattgaaggtgaacttcgtcctggtatgaaagtcgtagttattgaggacttgatttcaactggcggcagcagtttgaaagctgttgaagctatccgtcgtgacggatgtgaagtgattggtatggtcgctgcatttacttatggtttcccagtggcaattgaagcgttcaaggaagcaaaagtgaacttggttactctgactaattatgaagctgtattggattcagccttgaagaccggatatattaatgaagaggatgttccggttttggataattggagaaaggatccggctcattgggaggcaggcaaataagttatagttttaaaacaaatataatatgaagagaaccgttcgggaatttttatggatttccggattgttcttttcgtgtttttagagagcaggtattatggcacaatttgagagtggtgtgaaatatgttccttatagtcaggaacaggtgtttaataagttgtcggatttaagtaacttggaatctgtacgtgataaattggccgacaaggtacaaggtatggagttcgacagtgactctttaagttttacggtacaaggcataagcattactttgcgtattatagaacgtgaaccttataaatgtgttaaattcgaaagtgaaaaatctccggtccctatgaatttgtggattcagattttgcctgtagaggctgggcaggcaaaactgaaagtaactattcgtgcagaagtgaatatgtttatgaaggcgatggttgctaaacctttacaggatggtgtggataaactggctgagatgttatcgatgattccttattaaaaataaagacaaatatggcacagaaactttgggaaaaaaatgtccgggtaaatgaggagatagatcgttttactgtaggacgtgaccgtgaaatggatctttatctggctaaacacgatgtattgggctcaatggcacatatcaccatgttggaaagtatcggtttgcttacagccggagaattggaaatgttattagcggaattaaagaatatctatgcttctgccgaaaagggagagtttgtaatagaggatggtatagaggatgtacactcgcaagtagaattgatgttgacgcgtaagttgggagatgtcggaaagaaaattcatagtggacgttcacgcaatgaccaggtgttggtggatttgaagctgtttactcgtgcggaattaaaagaagtggccgaagaggtggagcaactttttcatgtgctgatttctcaaagcaatacatataaggatgtgttaatgccgggttacactcatttgcagatagcgatgccttcttcatttggcttgtggtttggcgcgtatgctgagagtctggtggacgatatgatgtttctgcaggctgcattcaaaatgtgcaaccgcaatccgttgggctctgctgccgggtatggttcttcttttccgctcgatcgtgagatgaccacccgcttgttgggatttgattcgatggattataatgtggtgtatgcgcagatggggcgtggtaagatggaacgtaatgtggcttttgctttggcttctattgccgggacagtttctaaaatggcttttgacgcttgtatgttcagtagccaaaactttggctttgtaaaacttccggatgaatgtactaccggctccagtataatgcctcataaaaagaaccctgatgtctttgaattgacacgggcaaaatgcaacaagctgcaggctcttcctcagcagattatgatgataatgaataatttgccttcggggtattttcgtgatttgcagattataaaagaagttttcttgcctgcgttccgggagttgaaggaatgtctgcaaatggctgcctatattatggacaaaattaaaatcaacgaacatattctggatgatgaccgttacctttatatctttagtgtggaagaggtcaaccgtttggcgtctgaaggtatgccgttccgtgatgcttataaaaaggttggcctggacatagaagccggcaagttcacccatgacaagaaggtgcatcatactcatgagggtagtatcggtaatttgtgtaatgacaggatcgaaagcttgatgcggcaagtagtggacggatttaatttctcagtcatggaacaggctgaacgaagccttttaggtagatagaaataattgtaaaacgtaatagcatgaaatatcaaccttcggcagaccgttatagcaaaatgcagtacaaatactgcggaaatagcggcttgcttttacctcgtatctctttaggtttgtggcataactttggtagtgtggacgattttggtgtagcaaccgatatgattaaatatgcttttgatagcggggttacacattttgacttagctaataattatggccctgttccgggaagtgctgagattaatttcggtaaaattctgaaggagaatttccaaggttaccgtgatgaattgattatttcctcaaaagcaggacacgaaatgtggaatggaccttatgggggaaacagttcgcgtaagaatttaatggccagtatcgaccaaagcctgtgccgtaccggtttggattactttgatatattctatagtcaccgttatgatggcgtgaccccggttgaggaaacgatgcaagcgttgattgatatagtgaagcaaggaaaagcattgtatgtgggtatttcaaagtatccgcctatgcaggcaaaggtggcttatgaaatattgagaagtgccggtgtgccgtgtttgatcagccaatatcgttatagtatgtttgatcgtgctgtggaggaggaggtattgccgttggccgctgaacaaggctccggctttattgcattttcgcctttggcacaaggattgctgaccaataaatatttgcatggtattccggagcactctcgtgcggctcgtgctactgggtttttgaaagtagaccaagtgacagaagataaagtggaaaaagcacgtcggctgaatgaggtggctgtacgccgtgggcagactttggctgagatggcattggcatgggtgttgaaagacgaacggatgacctctgttattgtgggggcaagttctgtaaaacagctggcagataatcttcatgcgttggataatttggcctttactgatgcagaattgaccgaaatagagggaattttacgattgtgaataaaaaaatgggtgtaaagtttggttggtattataaaatggcttatctttgcacccgttaaaacaaaacgcggaaatagctcagttggtagagcataaccttgccaaggttagggtcgcgagttcgagtctcgttttccgctctctctcgtcgaggatgctcgaatggtggaatcggtagacacgagggacttaaaatcccttggccattgcggctgtgcgggttcaagtcccgcttcgagtacaagatgtaattgcaatcattggaaaactgatgattgcgatttttgttttgtataattcaccataagataacggaagcagaagcagggtcaacgtaacaatctgagggattttatatttaagcatataatttagcaagtctatataaaaaaaaagctctatctcttactcctctgaactgtgctctaaatgctttgattttagcattgaatgactcagcttcggcattggttgccctcctttcaaaaaaattgattatatccagataatgtgtttgtatagaacgtgcgacccttccaaaggtgaggaaccctgatttatctacttcatcataccaccttgccagccttgtcaaagcaatatccttaaacttacgctgatgatagattaagcctaaccgcatagacagataatatcctttctttatatcgggatattccttgaaaagaatttcatgggtcaacgtaacaatctgagggattttatatttaagcatataatttagcaagtctatataagaaaaaagctctatctcttactcctctgaactgtgctctaaatgctttgattttagcattgaatgactcactcagcttcggcattggttgccctcctttcaaaaaaattgattatatccagataatgtgtttgtatagaacgtgcgacccttccaaaggtgaggaaccctgatttatctacttcatcataccaccttgccagccttgtcaaagcaatatccttaaacttacactgatgatagattaagcctaaccgcatagacagataatatcctttctttatatcgggatattccttgaaaagaatttcagcccgtattctttgagactgagtccataaggattccttcttgtaaagcagataaatacttctcgctaacaactgctttcttgtatctccattagcgaaaacaggtgcatgatacatctttccacaggcctttgcataagcaatctgagtggactcttcatccaaagcctcccagcgagcttttacacgcatctcctgcacagcttcataagctaacttctgtacgtgaaagcgatcggtaacacgtttggccgcaggaaagcagatgcgtgcaatctgctccatgttagaagccatatccaaggttatctcgcgcacttggtaacggcggcgacgggagagcttaagcaggacagaagtgaccgtatgaacgtccgtacctttaatgatggcaatcatactacctttaccaccgtgagcttctttattggtcagtacagtatagagttccccacgcgagagggctacctcatcaatacagatataagcaccgatattcttttcgaatagtagccaatcctctgcatgaacaagttggtcccaatggagataaccacttagatggttacggtattgacgctccaataaatccccgtcaactccagataaaacacctaagagcttgcaactgatcggatagctatcaatatagttcttttaaaaaagacgcaaaatcctgcgtcatacgagtaccttcagccaccatacgccagttacgagagatatactcattatgcttatttaagagccagcgacgacgacgaatattaaggaagaccttcttgccacggagaggaaaatcttgaacaataacagggtcataaaagcctttactctcagtatcctgatctgtatacttctcaggaacgatatttttctcctcaaggtagaacacaacttcatttacgctttccttcacatcaacaagatcaaagtaatctaaagtgccttcaggaagaagaaggcgataaccgtttaactccataagctatgaatttggagacaaagataacaatttataaatttacccctcagctttttacattgacccaatttcagcccgtattctttgagactgagtccataaggattcctccttgtaaagcagataaatacttctcgctaacaactgcttccttgtatctccattagcgaaaacaggtgcatgatacatctttccacaggcctttgcataagcaatctgagtggactcttcatccaaagcctcccagcgagcttttacccgcatctcctgcacagctttataagctaccttctgtacgtgaaagcgatcggtaacacgtttggccgcaggaaagcagatgcgtgcaatctgctccatgttaggagccatatccaaagtaatctcgcgcacttggtaacggcggcgacgggatagcttaagcaggacagaagtgaccgtatgaacgtccgtacctttaatgatagcaatcatactacctttaccaccgtgagcttctttattggtcaggacagtatagagttccccacgcgagagggctacctcatcaatacagatacaagcaccgatattcttttcgaatagtagccaactctctgcatgaacaagttggtcccaatggagataaccacttagatggttacggtattgacgctccaataaatccccgtcaactccagataaaacacctaagagcttgcaactgatcggatagctatcaatatagttcttttaaaaaaaacgcaaaatcctgcgtcatacgagtaccttcagccaccatacgccagttacgagagatatactcattatgcttctttaagatccagcgacgacgacgaatattaaggaagaccttcttgccacgaagaggaaaatcctgaacaataacaggatcataaaagcctttactctcagtatcctgatctgtatacttctcaggaacgatatttttctcctcaagatagatcacaacttcatttacgctttccttcacatcaacaagatcaaagtaatctaaagtgccttcaggaagaagaaggcgataaccgtttaactccataagctatgaatttggaaacaaagataacaatttataaatttacccctcagctttttacattgaccccagaagtacgggtcagcggattttcctggttggtaagctttcttttaagtgtatagcctagccagtctgaacatgaagaatttcagggtcagcggattttcgggtcagtttgaaaacttgggatcagttgtaagttttagatggagaagtatgagaaagtgatggcagcatcctttttcaacacataaaacaaggagctgccaccacccctaaatctttttatccatcagtgtttccgataaaaggtggtagcagtggcagcagattttaaaaactctattgtggaactttccggcaaatacagtctgtcagatgatcgttgataaaacctgaagcttgcaaatgggcgtagcaaattgtagtcccgaagaacttgaaacctcgttttttcatatctttactcatggcatcggattcgggagaggataccggaatctcgctcaatgaccggaatgtgttgataatcggctttttgtcgggaaagaatgacagggtgtaattataaaaactgccgaattccttttgtacggcaaggaatagttttgcattcgtgattgtcgatttgattttcagacggttttttacaattccttcaaattgcattagccgctcaatgtcttcatcggtcatttgtgctaccagttcggcatcaaaattatagaaagctttacgatacccctctctttttctaagaatcgttatccagcttagtcctgcttgggcactttccaatacaagaaactcaaacagcgtcttgtcatcggtaactaactttccccactcttggtcatggtatttcacatacaattcgtctgttccgcaccaaccgcaacgtccgtttgttatatcttgcataattctaatatttgtgatatagaacaaatgtagtggattcatggcattatgccaaatttaaaaggactattttgtggcataaatacctataaaaagttattgcatagtatatatattccgtaaaatgggggaaaagattacctatatcaggtgattgtttccccttttctttttacggacctttgcattctcaaaaattaagaatttagaattataggtattcatggtaaaaagacagttacaaaggatcagtttaggctctcttttttttataatcggagcgatatctatctttgcacaacctaagacaatggtatccggtaaagtaatatccaaagaaaaacaggaagtcgtagattttgcaaccgtatatttgaagggtacaacttatggatgtacaacgaatgaagaaggtatctatcatcttcatgcaccggcagggaaatacacgctggttgtttcggctataggatataagactatagaaaagcctgtaactttggttcatggtgaaagaattaagatgaatgtaatgattgacccgtcagtgactgagttgggtgaagtggtagtggtgtctaacggggtttcccgtgtgaaacgttccgcattcaatgcgatagctgtagatacaaaagaattccagaattctaccaagaatctgagtgatgctttggctaaagctccggggatgaaactccgtgagtcggggggggtaggttcggatatgcaattgatgttggatggtttcagtggcaaacatgtgaagatatttattgacggtgtacctcaggagggagtagggagctcttttggcttgaataatattcctgtgaattttgcagataggattgaagtgtataaaggggtggttcctgtaggatttggcacggatgctataggtggtgttatcaatattgtaaccaataagaagaaacgtaattggtttttggatggctcctattcatacgggtcgttcaatacgcataaatcgtatgtgaatttcggacaaactttcaaaaacggctttacttatgaaataaatgcttttcaaaactattcggataatgattatcaggtggacgcaccggtagaggactttgaaaccggaagaattgataaagataaaagggtacgtgtgaagcgctttaatgatacctatcataatgaggcggttataggtaagatgggtattgtggataagaaatgggcagacagattgatgttgggctttacttattcacacatgtataaggagatacagaccggagtacgtcaggaaatagtctatggggaaaagcatcgtaaaggacattcgttgatgccgtcattggaatatagtaaacgtggtttattcatcaaaggtctggatgtggcattgactgccaattataataaaaatgcaacgacaaatatagatacagcttcctataagtacaattggttgggtgatagaaaattaatgaactcacccggtgaacaatccaatcaatattcacgggcggataataacaattggaatggaacattaaccgttaattaccgtctggcgaaaatacatatgctgacctttaatcatgtgttgaatactttccgccgttctaacacttctttgttggctaagatggaatcggaggatgccatagctaaagaaacccataagaatatctccggattgtcctatcggttgatgccgtctgataattggaatctctcagtatttggaaaatattatagtttgtatgtggcaggtcctatggctacgactacgaatcaagatgattatgtccgtactacccgaaacatgaattccataggatatggagctgcgggaacttatttcattctacccggtttgcaggcgaaattgtcatacgaaaaagcatatcgtctgcctactattgaagaaatgtttggagatgaggatttggaaatgggagatatcagtataaaaccggagagtagtgataatttgaattttaatttgagctataacagaacatttggcaggcattctgtatatatggaaggtggagtgatttatcggaatacaaaagattatattcagcgtaatattgcggatttgagtggtggtaaatatgccgcgaaatatattaattacggtaaagtattgacgaaaggatatactgtttctgctcgttacggttttggtaattgggtgagtataggaggtaattttaccaaaatggatgtacgcgacaatatgagaacatctatttccagcagtgcggaaaatctggcttataaagaacggatgccgaatctgccctatatgtttgctgattcggatgttactttttattggcgggatttaggaaggaaaggcaatatgttgaccgtgtcttatgataatcaatatctgcataactttacttattattcttcccgaataggctcaaataagggggattatgtggtacctgatcaattctcacacaatatatccttttcttatagtttgcaaaaaggacgatataacgtatcattggaatgtcgtaacttcacagatgagaagttatatgataattttagtcttcagaaggccggtagggctttttatggtaaactgcgtgtttgtttcggtaattaaagaattggaaaaaggagtttataattaattggatttaaaattaaatagaagaataaaatgaagaaagatttctttttgaacggatttactgctattgccatagtaggaatggcgttgagtgcatgtacggataatgagccggattacggtttgggtaccgaggctaaaggtgagtatgttattgcatcgtcggtcacagcgtctggaaatacaacgaatgtgctgcttacttctgaaacgttggataaaggtactgtttctacagtgaataatggtcttgtgaatgatggtgcaactcaatgggtgttttacaagaatcaatatctttatgcgctgacttataatcaagggaatgcaggtacgacccgttcttatatcatggattcaaataatgaagtaaaggctcgttcgggggagtttgccgtaaagagatttactacttacggtatttatgataaatatatcatgacctcgtctaccggtgacggacccacagcgtatgctgatgagaatggatatttaccaaagatgtttttgctttcttatttggacgtatctgctgaaacatttacaacgaatgatactcaaaataaggcttatatgtccgaaaacttcttgggaaatggagaatatgtaacattggccggcatattggaacgaaataataaactgtatagcgctgctattccaatggggttaagtcaatatggttcggctactgacgggggaaagtggatacttcccggcaatgaggatttggtaaagacagaagatggtggttccaacagcagcagttataaaaaaggtgaattgcaatggacgcaatatcccaataaatgctgggtggctatttttgatgatgaaacgctgacaaataaaaaaatcatagaaacagataagatcagttatgcttgcgggcgttttaaatcacagtattatcaaacgatttgggcggcagataatggtgatatttatgtattttctcctagttatgccaaaacaatggctgataaacggcaacagactaccttggatgccggagtagtacgtataaaggctggaacggaagagtttgatcctgattattattatagtatcgaagcgcagaccggaggtaaatctttcattcgttgttggcatattacgggagattatttcttgttgttgatgtatgatcgttccttgactgaaactggtttcacagctaatcagttagcgatatataaaggagaaaccggaaaactgacttatgtaactggtttgccttctgccgatttgatctccggctttggcaatactccgtatgtggagaatggatatgcctatatggctgtaactacaacagaaggatatccgtctatttataaaatagatccggttggtgcggtagcgacaaagggtgtttctatagaagcgacacaaatcagtggcgtcggtaaactgcaacctcagaactgagtattgtaataatataatgggagtctgcgggcagtatgtgcttatgcagactctttttatgaatcgtatcgaagattttatgaagaaaatatttcgccaaatacatctttggctttctgttcctttcgggttaatcatttccttgatttgcttctcgggagccatgttggtttttgaaaatgaagtgatggaactggtcaggcatgaactttattatgtaaaaaaggtagagacagtttcacttcctgttgatcgattattggaagaggtagaactcatgttacccgacagtgtgtctgtcacaggaatcaatgttttctctgacccggaacgtgcttggcaggtgaatttgtccaagcctcgtcgtgctttcatgtatgtggatcaatatactggtgagattaaaggtaaatatgaacgtcctgcattttttgtgactatgttcaggctgcatcgctggctgttggacagtatgaaagcggatggcggagtcttctggggaaaaatgattgtaggtgtcagcaccctgttgtttgtcgtggttttgatatcgggtatcgttatctggtggcctcgtacacgaaaagccttgaaaaatagtttaagaatatctgtcggcaggggctttagaagattttggtatgacctgcatgttgcaggtggtatgtatgcgctgttttttttgttggctatggcccttaccgggctaacatggtcttttggatggtatcggacaggtttctataaagtgtttggcgtggaagtacagcagggaggtgctcatggtggggtgacccagcgtggggggaaaggcggcgaccaatccggaaagaatgtttctcattcttcgtcctatgtttgttggcaacaagtttatgaacaattagccctgaataatcccggctacaaacagataaccttatcagatggggcagcaaatgtttctttcaataccttcggtaatcaacgtgcttccgaccgttataaattcaatcctcatacaggtaagattaatgaggtagttttatataaagatgctgagaaggttggaaagattcgcggatggatctattctgtacatgttggtagttggggcggtatgcttacccgtttactgacgtttatagcagctttgataggagccaccttgccattgacaggatactatttatggataaaacgtatttggagaaagaaagtaagagtaagttgaatatctttgttataagattagggggcgaaaagaattttatcatatgacctgttgtcgtgaatgacaggtcatatgatattgttacaggattttttagaaccactttatctttctgaaaataacaaaagccaacgcagataatgtgatggacgccaaaataataaaactaaaagcatgtggtaatgcatctacatgtacatctacattcattccatagaaactagctattaatgtgggtaccatcagaatgatggaaatactggtcatgcgtttcatgatggtgttcacattgttggatatgatggaagcaaatgcgtccatggttccggttaagatatcactgtagatattaaccgtgttatatgcttgttttaattcaataactacatcttctaccaaatcgcggttttgataatctttttcctggaagatactttgcaatttacctaccatcacctcatttccacgaatggacgtattgaaataaaccaatgttttttgtagtttcatcaatctgagcaggtcctcattacgtatgctcctttccaattctttttctgcggcagctacatcattgtttatttgtttcagatatttcaagaaccatacggcagatgagtaaattaaccgtaaaatcaattcaaatttattaggcacaatgattcctttacgtcgggtgtggtcaataaaatcaggaatcatttcagtggagtgataacacacggtaacaatgatttcattatttgtaatgataccgatggggatagtgatataagggatgcttccctgttgttgcagggggattcggataatggtcagtagccagttgtcttccgtatccgttctcggacgttcatccatatcggcgatgtcctctaaaaaagcttcgggaacttttaattctttagtcagaaactcaaaatcactttggtcggggcattctacattcacccagcagtttggcatccattgtggcttttctacaaagccattctcacaataaagatattttctcatcttattgcctcctttcgttcgtttatatccgttcagaggcattcagagtagtgattgccctgtcggatcagttaatactattgcacgttcgtggtattgaatcgtccatttttattgattgttttttgttttaagcggtacaaaagtacataaaacctttaaaggacagacagaagtcaggaggcttttatattttttttaagaatatcaccggaaagcaatcagtgccggagcaatgatggttttgtcgccatagcgcagttctaacgtactgtgtttaccgattaagttccctggcggaaactattgttgttaaaacatttagcatccttttaattacatgcaaaattcacttaaaaaatcgtttgtccaatacctatttatgatgaatcttgttctatataatcctaataattaggtattgtggaaggtgctgaagtcggttacctttgcaaatgtaataattacaatttaaaaattagttttaatttaaaaataaaaagagtatggaaccaattattaattcacaagttcctgaatttaaagttcaggcattccataatggagagtttaaaaccgtaactaataaagatattgaaggtaaatgggctattttcttcttctatcctgctgactttacgtttgtatgccctaccgaacttgtagatattgctgaaaagtataatcagttcaaagaaatgggagtggaagtatattctgtaagcaccgattcacatttcgttcataaagcatggcatgatgcgtctgaaagtatccgcaaaatcacttatccgatgttggcagatcctacaggtgctttgtcgcgtgcatttggtgtgatgattgaagaagacggtatggcttatcgtggtacttttgtagtgaatcccgaaggcaagatcaaattagctgaaattcaggacaacagcatcgggcgtaatgctgatgaacttcttcgtaaggtagaagctgcccagtttgtagccactcatgatggtgaggtttgtcctgctaaatggaagaaaggtgctgagaccttgaaaccgagtattgatttggtaggtaaaatttaaagtatagaactcatgttagatagtgcgataaaagatcagttaaaaggtctttttgcccaattggaagcgcactatacttttgacatctttgtccaccctcagcacgaaagtcgtgccgagttggtggacttgttggaagaagtggcttcctgttcggataaactttcctgtcggttgcaggatagtgaagggctgaagtttatccttttaaaagaaggaaaggatacgggaatcacatttcgtgccgtacctagtggtcatgaatttacttctttgttgatggctgttctgaatgctgacggcaaaggaaagaattttccggacgagtttattaccagacgtatcaaggcgttacaggggccgattagtttgaccacctatttgtctctcacctgtaccaattgtcccgatgtggttcaagctttgaatatgatggtacttctgaatggtcagatacgccatgaggcagtagatggatctataaatgaagaagaagtagaacggatgaaagtacaggccgttcctactgtatttgctgatggtgaacagattcatgtggggcgtagcagtatgggggatctgttggagaagctggaagcccgttacggttcggtggaattggaagctgttgagacaaaagaatatgatgtactggtagccggtgctggtcctgccggtgcgacagctgctatctactcggctcgtaaagggttgaaagtagcaataatagccgagcgtattggtggacaagtcaatgaaacgatggggattgagaacttgatatctgtgcctcagactaccggtaaacagttggcccaggatctgaaaaaacatttggcggaatatcatattgatattttagaaaatcgccggatagagaaagtggaagtggcagagggcatgaaagtgttgtctgtgaaaggtggagaaacgtataaggctcccgtattgatcattgctaccggggcgaattggagaaaattgaatgttcccggtgaagaaaaatacatcggtcatggagttgctttctgtcctcattgtgacggaccattttataaagataaggaagtagcagtcataggtggtggaaactccggggttgaggctgctattgatttggcgggagtctgttccaaagtgactgtattcgaattcatggatactttgaaagcggatactgttttgcaggagaaagctaaaagcctgcccaatgtggatattattactaatactcaaacggtagaggtgttaggaaacggtgataaagtggtggggcttataaagaaagaccgttcatccgaaaaagaagagatctttgccttggatggtatttttgtccaaataggtttgactgccaatagcactttgtttaaagaattgctggaaacgaaccgcatgggtgaaattctgactgataaaaatggccggacctctgtaaaaggtatctatgctgccggagatgtaacggatgtttcctataaacagatagttatagcaatgggggaaggcgccaaggctgctttagctgcattcgaagaccggatgcgcggaacgatttattagtgataagtggttggtggtgaatagtgggtgcatatcgcagtatttaccactaatcttatcactaaaaaatgcactctttgtatgtatattggtgagaatatgctttctttgtaggtgaatcaccgtttacagcattgatatggcagaatcgagacgtacttcattgaaagatttggcacagatattaggtgtatccatacctacagtatcccgtgccttgaaaaatagtcccgaaatcagtcgggaactttgtattaaagctcaaaaattggcaaaagagatgaattatcaccccaatccttttgctatgagtctccggaaaaatactccccgtaccattggagtaattgtacctgatattgttactcatttctttgcgtctattttaagtggtatagaagataccgctatagcaaacggctattttgttatcatcacgacttcccatgagtcatacgaccatgagaaaagaaatattgagaatttggtcaatatgcatgtggaaggtattataggttgtttatctcaagaaacaacagattatgcccattggttgagtttggatgatatgaatatgccgcttgttctatttgatcgtgtttgcatgcctgaccgtttttctacggtagtggctgatggagtatattctgctcagatggcgacacagcacttgttggatcatggaagcaaacggattgcttttatcggtggtgcaaaccatctggatatagtaagaaagagaaaacatggttaccttgaagcgttaagggaaaataagataccgattgagaaagatttggttgtgtgtcggaaaattgattttgaagaagggaaaatagctacagaaattttattatcgcttccggagcctcccgatgcaattcttgccatgaatgatacattggcatttgccgctatggaagtgattagaaatcataatcttcgtattcctcaggatatagcgcttattgggtatacagatgagcaacatgccaattatgtagtgcctcgcctttcggccgtctcgcatcagacttataagatgggagaagccgcatgtcagatgttgattgataagattaaaggagataaaaaaatcaggcaaatcattattcctacttgtttgcaggtgagggaaagcagtataaaaaggaaggattgagaaccgaaatgtattttaagaagagaataaggctgaactcttcacaaagagccaaccttatttctttatatattggagtattattgagtgaccaacgtaataatggaacgtgccggaatcacaactttttcatggtttttgatgcttcccaccggtagaagattctctccatctttatccgaagtacgatagattttccagttttttataattccgttacgctgatagaaagtaaactctttatcttccgctgcataattaatcataacgaaaacctcctttccgtctgtattttggtatgctgaacacattagtccggttacatctgtatcgccttcaggaatgattttcccttggttgtctttggctataattgctttccgaacagctcccgggcgtataaatctactgtagtttcccaaagcccacattaatttggagtctttcacctcaccattcagaaaagtcggatcactatactcacggattaatccgtctttataatctccaccgatagatcgccaccattgccaactgcgagcacctgcatatacaatgtcatgatgaatgatccgtgctacatataatgctgtcttcatggtgaagtcatatcctccgcctccgccgatttcttcgtcattgcccatgatacaggtttctgtctgccagaaatccaccttatacttgtctaaagtatcttttaattgacaacggatatcgtgtaaattattcagaggagtattagtccaataactatgccctaccatcagccggggaacattgggagtatcacccagataggtggctgtactgtccggattaaagaaagactggatttgatacccccgttcccaattagtcatgtgagtatcgaacatacaacgatagtcagaggactcattgactagaatctgtgtgtcaatttggttatttacgaactctttactgatgaggcgtatggcacgggctatttcgcggttggtagccggtgtaccttcttgtttggggccaatccagttccaatgcccatcgggttcattgaatggacagaggtaattgaacttgattccatcgtgtttctccaccccttttatgacattggcaagaaaacgggcaaaattcttataatgctcttcctttaagtttaaggttcctccacggcctgtgttggtggcaagaccgttttgtgtgaaatatacgggaggtgaattaagaaatgccaaaaatttgtttacaccccgttcttttgccagacgcaggaagttgcgctgcccttgttgtttattccaattatagttaccatctgcctgaaggaaacattcggtgcgcatccagggagaggctatctggctggcttctccttgttccgcacttccggctcctacattgaaacgccataaagacaagccgattcctttaggttgtccgttttcatggttttccgtactgaacagccagtcggctacttggttttgtttttcttgcggccataagccgataaattgcatgctccaacagtctgatgctccgaaatagtccatggtttgacagggttggtctgtttctatttcaaagtgaatggcaggatgttgagcaaacaggtttgctgttgcaaataaagagaataataatgctttgtatttcataaagttgagggattatttcagattataaatgacagttgtaacactttccgaaggcacaattacttgttggtctgccgtgacgtgtacctcttgcaaatttttgttatttgttgttgtataagtagtgatggagcttatttcacttacccattctttatgaatttcgtttagccggactcctttttctgatagattggtataaacagcaacaattttatcttttttcggtgaaatccatgctgacccgaagaaactggatgattcattcatgttaagcatgatacggcgataacccggtcggatgaataggctgtagttacctaatacccaaagtgtgggagtagctttataagtgccttctttctctatatccccataaactccatcggagggttccagtgaaatcagtaagaagcggtttttgtgtccccagcgggggagatccattgaggtccagtaactccaggaggaaactcctgctatagttaggtcattgtgtattacttttgacatataaagtgcaatgtccatttcggttgcttggtcatagcctataaactcggaagagctgtatccgtcgcctaacatactccactcactttgccatatttctacatcatattgttgggctgcttgggccagttgtttccggacattacgcataccatcccatgtgccatctgtccagtagctgtggccgcagataagtttctttacatgagtcaggttgcctatataggtggaagttccaggtgtgaaaaatgctgaaagtacgttactatgggcggcatcattcttaaatttgtagagatattcataatctccagattcccctggaagaatatcaatagaaagaccggcagaagtgatggcggtatccaattcacgtataagtctggctacttcatcattagtccatccgctgccttcctggccgctgtcccaattatattggggttcgttaactggtgagatatgtgtcactggatatccttcgtttacatagtattttgctacatctgacatgtatctggcaaagtccgtataacattcatccttcaaattagaaactcctccgctattggagaatccttttccgttggaggtatattgtacaggaggggtattgctgaaaagtactatactctgacaaccaaactctttggcgcgctgcaagaagtagcgctgccctttacagcgtgtccagtctaatgttaagtcatcagtcagataagattctgctctgcgtgatttgtcttctattccacttgcttcaccttgttctgcactgccaccacctagattcacacgccacatggagagtcctatacctttaggttgtcctgattgtatttcagaagagaatagcagttcactgattttgtcacgattcgttatccagctttttcctacgaaggcaggtgcccaacaatctgatgcgccaaatcctgtcagagtctgaaaagattgtccggcatctatggttactgttttttctacgtttatgctgctgtccggttgccccgatgtatccggtgtttggggagaatcgtcactgcaggctacagtagaaaagaacagtggaagagtaaaaatatattttagtttcattgttttagatggattaaaaaatagtcgcggataatcctagcaaactatccgcgacagaatataaagacctattgaatgtttaattcctgtaacaatctgttctttttggaaaatgattaattccagcccggattttgggtgatagaaccattagacattgtaatctcatataaaggtatcgggaataccatatcccggttttcgttgaagctgattcctttatcacttgcctcaccttgattttcccattcgtaaatgtcgcgggtagcgggatctgtattgtattttacaaatgtaccgtttgctcccatcaggttacaaatcattttcttgccattgtcatctgtccaacggcggatatcatagattctgttttgttcccatgccagttccaaacgacgttctagccggatagctttgcgaagctcgttcccactggatgtgacagcaggtaattttacacgattccgtacctcattaaggtaggtacgtgctgtaccatcttcgcccaattcgttgcaggcttcagcatacatcaacaatacatctgcatagcgtaagatacgatgatctaatggaattttgtcgatattgtatacttccggacgtttttcaataggtacaaaatacttccggacaatacgtgctgatttatgttgtgacggatctataatataacattcgggatcccaaccgtacttttcgatataatctttataattggcgatttttgtgttgttttcaacgaacttgtcgaagttattctctccggcaatttctgtacaaccggttttaatgatagtccaacgtaaacgttctgtatctcctgcatcgatgtaggcttgttcgaggttagcggttggctgtccccaagaccatccgtcgccgggaccactacgggcaccggtaataacagtcaaagaaccacccaatgcataagttccatcatacatatattgtacttcaaacagactttcttcgctattgttatggtcaacatcccatacatcaccgaagttgtcgagtaatttatattcaccttcgtcgatgactgttttcaatacatcatgtgcctcttgccatttgctttggtagaggtaaacctttcccaataggcctaatgcagctccacgggtagcgcgtcccatatctgtagcagcatattgactacgttgtggcaacacatcagcagcggcttttaaatcatcttcaatgaacttatatacatcttcggccgaagcgcgggtaataccttgtatttcttcgggcaacaggaagcctgtaatgagaggcacaccaccaaaattcttcacaagttcaaaatagaagtatccacggagaaaacgtgcttcggctacaagccggttcttcatttcttcatctgagaaatcagcttgtgaaatgcgttccactgcgatattgcaacgtagaatgcctttgtatcgatactgccaaaagttggagatggcaccattgctttgtccggtaccttgatagtgggccaaagaaatatagtcactttgactttggctggtattgcccatccaaccgtcatcactacacatctcggaaagcaaccatactgtgttgatattccaccatccgccaaaagtaatggcctggtaacaaccagtaataaatgcttcggcttcttctgcactttggaaataagtatccaaattttgttgcccgcgcacttcctctgttaggaaatcctcacaagaagtgaatgtcagcgaggcaatcattgttaatattgttaatatctttttcatggtttataccttgagggttaaaattttaaatcaattccaaataagaaagtacgtgggttaggataagcgatgccgtcaataccggtttcaattacactgccatctttaccaatctgtggacgttcaggatccatacctgagtagctggtgatagtgaaaggattttgagccgacaatgagagacgcaattcggttccgttcaaccacttcttggggagtgtgtaacccacttgtaatagtttgcaacgcatataagagccgtcttctacaaagaaacttgaaatgcgtgtgtaattctgattcaaatcattgtaggacagacgaggaatatcgttgctggttccttcgccatgccatgctttctgcaatgtacctgcccaaacgttttgcccacttacgccggagtataaacctttggccttattgaaaatatcattaccgaatgtaccatagaagttggctgtgaaatcgatgtttttatagctgaaacccaagttcaaacctaccatcaaatcgggatatgggttaccgatccatgttttatcattttcatctagaactccgtcatgattcaaatccttaaagcgaatgtcaccgggttgggcattggattgtaccagcttgccattttcgttggtgtgagcataaacttcatcccaattttggaaaataccatcggctacgtagccgtagaagcgtgaaatcaagccaccgtcttcattacggataatttggtcgctgttgaaacctccagtttggataggaccgtcaccggagaatttaacagctttatttttcactgcggaaaggttcaatcccacattatatcggaagtctgctactttgtcgtgccagttcagacttaattcccagccgctagctttcatactacctatattcatccatactgtactgttccagtcggggtatccgatggcgaagatattttgtttctgatagagcatatcagaagatttcttttggaaatactcaaaggtcatgtctagacgggagtcaaggaaggacatatccacacctacgttccagtcttctactgtttcccattttagcaaattattgccaacgcctgataccatagtacctgaaacacgtcctggagctgtaccgaatacataatcagattgtcctaacaaagtcagcgtagcatcattatctatgttttgattacctacacgtccccaacctccgcgtaatttcaagttactgaaaatcttctggtcttgcatgaaactttcactgatgatacgccatgaagcagaaacagaagggaagatggcatatttgtttcctttggggaaacgagaagaaccatctgcacgaatagaagctgttagatagtaacgattgtcatagttatacatcacgcgtcctaaataagatactaatgtgctgtaagcagttttaccttctgacttttggttttgtgtaccggcatttacttcctgcatttgatccatattattaggaacatcgtcacgtgaggcttttgattggaattcagcaaagcgttcagctgtaaagccacccattacattaatattatgcttttctgcaaaagtcgtgatgtaagtagcagtattagtccagttccaatcaagccattcctgcatttcacgggaaacattacttaatgtagattgttccaaagcatcaatatagaattcaggagtgaatttgtctgtacggcggaagtgtgcattagcgccgaactgcgtgcgcagggtcagtttttgaatagggcttatctgtaaataagtatttacaattgtacccatttcacgggagtgggaattttggcgagccaatgaaccggcagggttccactcctggttgttgtaagaacgctgatagttattgaattcgttatccacccattgatcttccggcttgaatataggagttgtggggtccatagacatggcagctgaaaaaagatcgggagtatcatcccatgattctacacgtggggcaatgtcgaaacccatttttacatatttattaaatgtatattctgtattaaggcgtgcgttgattttgtcccaataaccatagtcatattgtgaattgttacggtagtaacccatactcaggttataaaccagtttgtctgaaccaccggagatattgagtgagtaattttgcactaaagcagttttgttgattacttcgtcccaccagtctgttcctccgggattggtagtagcgcctgtatcattccaaatagaagttcctccgtcatttgtgtatcgggtattgaatacttctttatattcggcggcattagccattttgggttttgacaatgtttggaaacctgcagatgcattaaaactgatatttgtttttcctgccattccttttttggttgtgattagaatgacaccgttagaagcacgtgttccgtaaatggcagcagccgaagcgtcttttaaaacttccatagattcaatgtcattactgtttaggaagttgatgtttgtacctaccggcatgccatctactacatacaaaggatcggttccgtttactgttgttacaccacggattagaacttttggttgtgcgcccggaccaccaccactggttacttgaacaccgttgattttaccttgcaaggcgtccattgcattaccggttacagtttcggtaatttcttttccttttacggtagatatagaactggtcaggtcactttttttcacggctccataaccaataaccactacttcgtccagtaattcactggcatctttcagcactacattgataacggtttgtccgtttacctttatttcttgagtctcatatcctatgctggagaacacaagtacggcatccttggcaacatcgtttagtgaataatcaccatcaatacttgtaatagtacctgtacctgtacctttaacttgcactgttgcaccaatcatcggttctttatctgaagccgaggttactacaccttttacagtgatggtctgcgcatagctacatagacttgtcagcgcaagacacaataataatatttgctttttcatatcttaaatctaatgttacttgttaattggccggaatgagtttagctctttccaaatgagtgtcgaatataagtttataattccctgtgacgttcactgttggttttgcccaattgtcacctacatgatcgggtttggtccatgccggattggtatatttggcttctttaccataatatccgaagatctccggttcgtctgagttgtctacacgccacgtgcaataattccaccatccgtcggagtgccagttatgaataacgaaattcattttagtacctgcctccaggaataggggggtatccaaatagaacaggtgaggattggtcttatcttgagtgaaacgcaggacttcagttgggctactggtcatatatccgaaatagaattcctgtaaccacgaaccaccgtcaccccatgtgtcaaggctgatagaaccgtatgtgtgaggtatggggtctacagcatcggcaattgagtaagttttcagattgtatgtactgttcttcacatcaatattaatttcataataaacattggcttggtcaagtacgattggcattgctgtttcgggatcgtctgtcagtttggtgttatcctctggatcaagcccgaaacaaataggagtgaagtcactcttttgtggtaagaagaatattttagttccggctttttgacagtaataatttgctttatactgatattcacctgtatgttcaattaccatcggtaccccgaatatatcactattcagttcttcggcagttgccacatctgccagatacattttgggaaaatccggcatttctgagatattcaatacactggtggtagtggttgagttttctttcttgtcaaaagcggtaattgtcacattataacttttcggttcattggggaatactattatttcggcaaagttcaatgaactttttccatcagcatctacacggcggttgtcaaacccgtctatacctggaatattaattgtgacataatccaatgcacgatcatctgtagccgtgaaccgaagattgaatttcgtttcatttttcattaatactgtaacagtggcatccggggcagttgaaaataccggagctgcaaaatctccgtccattgtgattaatacatcttgagatatactgcgtcctcctacatcggttacagtaactttgactgtgaaacgttcgccgatttcatttcggtttatgtcaaagtaataacttaaatcataactctcttgcggagcaccatagatttcgattaaatcaattgtcttgttcaaatgcaggtcggcacattgtaggctgatagaagcaataccgtctttgtcttctaatgtcccttcaatagtaaatcgatgtcccgctccggactcgatgtggtctgttgctaatgtcattgttggattttgcccgtctacatcggggtagtcgttatcatcactacatcccgtacataggtttgcagttacaagaaaagcccataacatggcaccatacaaatgtttctttttcatattttattagtatttgaagattaaacatctactctaatagaggacgaattaaattcgttagtggtgcaaatgtacgtgaagaagaattaaaatcctgatataaatcttgcagaaaagggaggtaaatcttgcaatgcatgatttatgtatctaaaatacagactttatttgtatttttgaaccatattatttaacaatgtgtacactgatgctatgagaaagatattcgtactttggctcttgctgctgtcggttgtttcattggcacaaccttattctgttaagcagcttggtatagagaagggattatccaataattatgtggtgagcattgctcaagacaaacagggctttctgtggtttgccacggaggaagggttgaacaaattcgatggtacccgtttcattacttatttgaagaatgaagatttgacaaggcagggtataacaggcaatgaactgaattgtttgttggatgatcctcaggattctatcctttggataggcacgcaaagggccggtctgaatgcgtatgactatgtaaataacacttttctttgctataggcatgatggcgagaaccccgaaagtctgataacggatgatgttactaagattgtggcagctacagatggtaatctttggattacgacatattggcggggagtagattatttcgataaaaaggctggaaaattcattcattacaatactcaaacagttccgggattggctagcgataatatttggtcggttgttgatggaggagatggaaagttgtatatggggcatgtgcatcatggattcagtgtgttgtctcttaaagataaaaaagtaaagaactttatgcatgaccctgaagatccggtcagtttgccaggtaatggggtaacttgcatttataaggacttaagcggtaatatttggctgggaacagaccgggggctggcactgttcaatccggaagccgaaaattttatccattttcatcatagtgaggacggggttcctcataccgtatttgatatcagacaatttgatgggaataaactttggattgccatggaatttggaggaatagccattttggatttaacgcaacgtatgtttctttctcctgaccaagtgcgttttcaatatataaaggaaggggatgatgaatacagtctctctaattctactgtacgttgtttgtttcaggactcctttaaaaatgtgtgggctggtatgtggggaggtggaattaattttcttagccatgaatcttcctattttaatgtttatagttattctcctatccagcattcgggtagtagcctgaataataagacagcaagtagtgtatgcgtagcaagggatggaaagttatggatcggaaccgatgggggaggcatcaatgtatttgataaaggcaagcgggtggcggtttataaagaagaaaccggtgatttgactgataattccatacaggctgcactttgtgattcggaaggaaacctttggtttggatcgtttatgggaggagtggatttttatgatgtgaaaaagaaaagttttcaccagatttttcctaaagataaaacaggggaagatgtgcgtgcactatatgaagatgcagaatatgtatggataggaactagtaatggcatctataaggtacgcttgcatgataaaggcattgcagatcattatacagtagagaataatctggtgagatgtatctcgaaagataatcttaatcgtttatggattggtactttcggaggaggattaggggtttttgatgaacattttcagtgcgttaaactttttaacgtgacttctctttttccctctaatactatcaatactgtttatatggatagtcagaacagaatgtggataggaacgggagaaggtctggtttgttttccatcctctcagagttgggactataaagtatatcgcagtgaggagggtttgtccaatgtccatatacgtgccattacggaagataatcatggaaatatatgggtgagcaccaataaaggtatcagctgcttgttgaaagacaaggaggttttctataattacgatcattgggataatgtgcctatgggcaatttcatgagtggaagtgtggcggaagctaaggatggaacactttattttggctcaatcaatggcttatgccgttttaatccagatcaggtattggaaaaacgagagtcacctgctgcaattattacggagatgcgtatattcggcccgttgcgtgatacggacagtaatgaaaaggtgatggcgcttgaaggccagtcggaagtacgtttaagctatatgcaaaataacttcagcgtcaccttcaatatacagaattatgccttggccgatcaagtggaatatgcttatatgttgaaagggttggaaaattcatggtatacagtaaccgatcctaataatgtgactttccgtaatatacctccgggaaattattgttttcaggtaaagacaagaatacggaatcaggaatgggcggatgagatagcttctctggatatccgtattgacccgcctgtatggcttacgtggtgggccaagttattttatattctttcgggtgtttctgtcctgtattttattcttcatgcctataaaaagaaactggatatggagtctctctatgagttggagaagaaaaatcatgagcaggaacaggagctgaataatgagcgtttacgtttctataccaatatcacacatgagttgcgtactcctttgacgttgattctgggaccgttggaagatatgcagaaaagtaattctttatcagggaaagattcacagaaaatatcggttatccatcaaagcgccatccggttgttgaacctgattaatcagatactggagttcagaaaaacggaaacccaaaacaagaaattatgtgtaagtcgtgacaatctggcagcccttgtacacgagatcggactgaagtataaggaattgaaccggaaacctgagattgatttctgtcttgagattgagcaggaagatatgtctttgttttttgataaggaggtagtaacgattatactggataatttgatctccaatgctataaaatatacagagaaaggaactataactttaggattacatcaggtggtccggaataatatacaccatacggaaatcagtgtgagtgacaccggtttcggtattgctcccgatgcattgcctcatatttttgaccgttattatcaagagggaagcgaacatcaggcttcaggaacaggtattggtctggctctggtaaagaacctggtagttttgcatgagggggagatcagggttgaaagttctttgaatgtgggaagtactttttatgtcagtctgctgacggataacacgtatcctcatgtgctgcatgctgactcgacggagaaaacttccgatgaaaagggcgaaaaagaagaaaatatagaacctgtgcataatggtaagcgtattctgctgatagtggaagataatagggacatctgtgattatattgtagaatctttctcggacgattttgaagtgaggactgccgccaatggtgaacaaggtttggaacaagcattgggctgcattcctgatattatagtcagtgatatcatgatgccggtgatgaacggcattgtgatgtgccggaaattgaaagaagacttgcgtaccagccatattcccattattttgctgacggcaaaggattctttgcaagataaggaagaagggtatcaagtaggtgctgactcttatctgacaaagcctttcagtgctactttgttgcatagccgtatccataatttgcttgaatcccgcaagttgttggcagagcgttttaatacgaattccatactcattgacaaacgtgcggcagtaaccgagtctatgaataaattggataatgagttccttgagaagattaacaagctgattgaagatcgtctttcttctgagaaaattgatatcggttatttgtcggacgccatgtgtatgagtaattctaccctatatcggaagatgaaggcattgaccggactttccaccaatgaatatatccgcaaaataaagatgcaatatgcggaacgtctgttattagaagggaaatacaatatttcagaggttgcattcaaggtgggaattaacagtacggtctatttccgtcagtgttttaaagatgaattcggtatggctccttctgattatctgaaaaagataaaaccggaatagagtggttgtgtaagccgtttcttccatatagttaagcttttttttacagtcatctgctacagactccgccagtggactgtaaggtctgcttgggtggactatacagtctgctgcaatggactctacggtccattgagggagtctgtagtaggtaaccgtaagaaagggcttaattgtaggcaagaaaagccttagctaatagggagattggactttgaaggaaattgctgtttctcaatttgtatgtttataaatgattgtagaatgctttcaccgtttcccatttataataaggggcaatagggctgtcaatgggtaatttgacttcattttcattatgtagcaattttacaataacttctccttgtttattcttgaaaaagattaattgaaggttggctcccataggtgaaacacggaaatcttgccaggccaggtaatatcggtcgggatctgtttcttgattggagcatccttctacttgcatgagtgccaacagacggatcaggttggtatcatgtccgaaacggagggtggcgcaaggagttccttcacggatggcgcggtcggcactttctataatattcttcaataaagattttgcactcttgggggctgctccctgattgacgggagcattggcattgcaaatatacatccgataattcacagactgccagataccgaataattcttctttttcaaacaaatcataaaaggatagaggcaactctacatcttgcatgtcggaagcaatccaataaagtcccatcatgagctcgcggggattcctgacttctttgggatttttgaaaagtgaagcgattaaacgttccggatgaatatgattttcttcgaatgtatggaaagctgttctccatggcgcacttgccgaacccagcttttcggcttcgggtgaagtataggcaatgtagtccatgtgtctttggttggcttcgcgggtgatctggagggaggggtttagttctttcagttgttctgtgaatgcggacatgctcatgatacaacgtacggaaacgctcgaacgcgctgatatgttggcgctgtcccggaatatatggggatattgttgataaagccgtttggcaatggctttgtgttgtcgttctcctaatggggtcaggtttcctccgcgcccacgggcattttcccatactttctggagtctgagcctcacatcttcacctaaatcggtaagtcctgatttattgtgaaacgtatcaaagacacgaatgacttctagataacgttcgtccgaagtcatccagcgggacccatggcgtccgtaatggctgatgtagaaaggactgtaaccttcgggtaccggagtttgtatgccgtttggtgtgggataagcataatagatgctacccattttttccgggctttggatgatttcttctttcagattgtgtgcggggagatctatgggagctactttccaattgatgccgagcggattattttgtatttcccatatcagagggaaatccggattatccataatccacatttcgcatccgtctactgagtcgtttacatgcagtaaggaatagcctatagcttgtgacttggtatcagccagttggtattctgtctgattataatgaaatgccttttggcttttcaattcctgaaaagcggttgctgaaagtagggcaaaggtttcttgaatggggagacagatatgctgtccgtcttccggctgtaagaagcttagtctgaccgccgtttttaaagcttcttggggcatggcgtagctgcctgattgccatcgggtgtttctttcaattccccaatgcagataaagggtgtcgttggactgattgaaagtaaattggtactttcgggtttgtccatgcagtttgaatacaaataacagagggttggtaatgatatcttgtgccattacatttcccatcaggctgccgataagcagaaagcatataaaaagttttttcttcatcgtatgttactctttagattcaggaaatagtttgctcccccagttaccgggactagggcccatttttaaaaccaactcgcctcctttgatgatatcattatggcggatggtggaatatggataattctttccatttaataaaatcgaccggatatacttgttcttttcggaaagcccttcggttttgatcgtgaatgttttgccttcctgtaaatggaaacgactctctgtcagtagaggggtatggattaaataatagtcttgtccggcattggggtacaaccccatcatgtggaataccaaccacgatgacatggctccggagtcatcatttccgggaagaccggcagaaccgtcattatagttcttctggataatttcatggatgcggtcgccacttttatccggacgccctacccagtggtataggcagggagtgaggaaggagggttcattattcacattgaagaaacccttgtcaaagaaaatatccagccgttcgtcaaacttctcttttccgccacattgttcaatgagtccgggtacgtcatgcggaatgctgagtgcatattcccaggaggaggcttcataaaagaacatgttccaccaaggagtataccaagggccttcaaaggtaacgggggtatatgtgaaggtgggtttctggatatgggagtttccgaaaggtattttgtctaaccagtttccttctttatcccggggaagtatgaatcctttgactcctgcatgttcataatcggcccgccacaagttcttccagttggaagattgtttcaagtattgctggtacaagtctgtcttgcctagtccttttgctactaaggctatggcataatcacaataggagtattctattgtgcggtttccggctcggggaataccgtatggaatatatcccaattccagataaggaatcagtccgcctcttccctccgcttcttcgttacctccgggcggtatggtcgcatctttcagcatagcttccaaagccagatggtaatctatgtttggtagtccttttacaaatgcatcggctataacaatttcggcgttggagccgccttgtgtccgtccgttacaatttccgcttcgtgcatcaggcatgtagccgtcccgtttatagatattgatcagtgaacgtacaatgtctgtttctctttgagggtcaatcagtgtgataagtggagttgaggtgcggtaggtgtcccagatagcataaaaatcatcataataaggttccggatcactccataatggattttcaccggtacggtctacaggcattaacatggtatggtagataccggtataaaacatacgcttatatttttcgggtgtatttgaggctatatcaatgcgttgcaataagttttcccattgtgccaataaggcttgccgggtgtcctcaaatgaccaatgaggtatttcgttccatacattctctctggctttgagagaactgataaatgaaattccgactttcagttgaatggtatttgcagaagaagggaaacgcaacaaagctccggttttttgttgggagtctggctggtatcgttcattgctgatctggtttcctttccatgtggtcgtttgtacaaagggatggtcggttactgcataaaaataaacggtgtaggcacgtccgttattccaacctccgcgaatacgggtatatcccattacttcgtgatcggatatgatttgaatttccgaacctacaaattgttgtgcttcgcgggcatcgggggtcggttgttcacccaggaagaagccggcgtcaaccaacagggattttaaggaatcttcgggataggtgaatcggtagaatgaggcgcgtggagcagttgttatttcagtatatatgcctgttctctggaattcggtagcataatagcccaagcggattgtttcatctttgcgatagtctatatgattgagctgatccatacctttgccaaaaggcatgacaagtatgttgccatatttaggacctcctcctgtcccgctgacgtgtacttgggagaaaccgttgacttgttcgggcataggcagccaaccactattgggatggacagtgcaatcgggcgatggtttcaccataccataagggcaggagggaccgataaatacccgtcccagtccttccgaaccgattctgggatctacgtaatcagaaagtctggcttcctgtgccgcgaccgtcacgggcagcagcaggaagaccagtcttaacaaagaaactttgaatggaatgtgggtcataattatttcttgtttatttttacacgtattgtattcttctctttgatatctcctccggcttgtgtcaattgagggaaggcccaataaatgttacagccggtaatccggatatccgaagcggtgtccagatagaaagcataagtcttgtcatatacaaaaccatctccgttacaaggacgtttgtcatacacaccgccttcataaccggtacgttttaacaacttgacatctatttcatcaaaatagatatgatgcactttctccggagtgtctccccctacgaaaatgccgttttcactagtgcatttaatctgattgaagaaaatgttgctgacttctcccgagtgtcctttcgttgcacctttggggaaacgccagcctgcatctttatgattgcctacggcacgagggtatgaggtgacatagataggttccgctttaccccaccatacatcagaatagaacatacagtctactaatatattggagaaaatgacattgctcacagtaccttcatcccggttttgtatgccgatgccccggttgctgtttttgataatgcaattattgaataatacattatcaatcttgtccatattttccgagcctatcttaatagcgcatgaacgtgaagtcatgatacaattagtcactacaatatcttcgcaagagccatattcttcaaattcccgacgattcttcaggcaaatgcagtcatcgcccgattcaatgaagcagttcgctatacgtacttttttggagtgatccacatcaataccgtcgccgttgcgtatttttagattattcaataaagagatgccgtcaatcaaggcatcgtaacagcctatcaggtgtattgtccaataggcgctgttccggatcgtgatgtcacggataacggttttctctacattgataagggtaagcacatgtgggcgtgggtcaaaatcagtgacgggcttcagctcgtaggaatcatccagctctttgcccataaaggcgattccgtttccgtctatttctcctgtaccggtaatggatatttgttttaagtcttttccactgatccacatcattccttcgccacggttttcgcggaatgcgctttctgtatagatgctttcatcggggttggccagcaatcgggagttgggttccagatgaaggttcacataggatttcaaatatagcggaccgcatagaaaggtgtgtccggcaggaatgattacggttccgccaccggcagcggaacaggcattgatggcgcgttgtatagcggcggcatcatctgtttgtccgtctcctttggctccataggtcatgatgtcgtacgtgttcccttgatgggaagtactgcatcctgtcacaaacaacaggaggcagcataagaggctgatgatagtttgattcttcatatgggttgttttttattttttgtacttatttcatattgtcgggaggcaggctgagggcggatgctccccagtttgtattagggttcgggcccatctggaactctaatgttcctccctgtattatatcttggtgtgtaaagtaattcttgtcatattcttttccgtttagttttgctgactggatatatatattttttttgttggcgttgtgggctaatatggtgaatgtctttccgttttccaagcggatgctcatccggggaaaagaaggacttcctattatataataaggtgtaccgggacataccggatagaatcccatagcagaaaatacataccaggcagacatctgtcctgcatcatcattacctgacagaccaccgggagcgttcagatattctgtttccataatatgacgtacctcccgttgggttttccaaggttgtccggcatagttgaagaggtaggctatctgatgacaaggttcgttgccgtgccagtagcggtgttcgctgaacatggaatccagtttggcaatgtatttttcttttccgcccatacattccataagtccgtatatatcatggggggcataccaagtataatggcagggagctccttcggtgatgaagcgggtgaaagaaaaggcgttaccggcatcggtgaggaaacttccgtcagcgtatctgccttgggcatatccggtgctagggtttattacgttacggtaatatcgtgcacgtatcattaatgtatcataaagtcctgttttttgtggatcaggaaagtaatcatctgatgtttccaacttttgcaggacttgggccaatacgaaatcatcgtatgcatattctaaagtacgtgacacttgttcgcaggtatgaaaggcttccggtacgctgtcttccaaaggaatgtatccatatttcagataagaattcaaagcacgccgtcccattccgtttttatattcttcataggtggcgggagtcctgaatgcgttccggagcattccttcgcaagctttgttgatatcaaaattacggattcctttgatataggcatctcccagtgcggagatgcaatgatcgcctatcatggctgcggtataactgttccaacaaggaaatataggcagccagccgccttgttcatatttgtccaccaatgattgcatcatgtctccggctttctttggggttaggatattgactaaaggatggagagcacggtaagtatcccacatactgtaatcttcatagtaatttctaccgttggctgattgtctgaacgggtgtcctgtggaaaaagaaggatagcgcccgtctacatcattgaatgtacgtggcaggaatgaggcacggtagagtgctccgtaaaatttctctttatcgtttcggttgtttgtctgtattgtaacttgtgaaagcctttgttcccagatggagttcagttcctgtcgggtgcggtcaaaatcccaatgaggtatctcggtgtccagattcttttgagcgccttccatgtcagtaaaagaggaagcggctttgattaatatgggtccttctgagtgtattttgaaccggagatatgcacctatacttgttccatcggctatctgtcgttgtccggcgaagagactgtcatgccggaatgtaccatattcttctatttcattttgatattcaatgataaagtacccgttgtatccggcgggttctccccagccttgatagatgcggtggacgggattgtatccgcgtatctgtttttttatggtatcgatttcaatatatcctttcccttcatcactgttaggattgactatgagataagcatcttccggttggttataagtgaatcggaaaatggctgaacgggaacgtccggtcatttctgcaaagatggaataatctttgagaaggacagagtaataggcgggcgttgctgtttcttcttggtgagagaacaggcttcctctgtcttggggaagatatttcagtgtacccgatacaggcatcaaggtcatggaaccgtaatcctgtgtacaacctccgacaatccaatgtgaattgcggaaaccttgtattttcgtatctttgtaataatagggagccttacattttgcttctgtatcttgtgtttggggagtccaaaagttcattccgttgggctctagaacagcaggcagcgtttgcccgtactcttcggtatttttgccgaaaagttctgcggtgtgggttgcgcttggtgcagtgcccgtacgggtatctacgtagaacagtagggattcttcctgatgaccgatacaagcagtaaacaggctgcatataatcagcaggtaagatagggtacttttcatagctcttcttggaaaagggttattttttaatctcctgatggagtatttttataaagagttccggccggtccagattgactaaatcgggatggacttcaatcgcttttttatattctttttcactcgcattctgaatagcagccattatcttgatatgattgcttttgcagaattctttgaattgaggagtgatattgaggatatctgtttctacataggccggggtgcatattttcatccatttctccaaagccgctatattggaggcatttactttaatcttcatttccggagcgattttgataaattctttcagcatttctgagtctgcaaaccagaagaaacttttattttcatatcctttttggcgtactaatgtaatcaaatcttttatcggagttcctcgttttacatcaaaaaaaatgtgtgcctttccttgtagggtatctagcatttcggctatacggggtacgtgaatgccgataaatcgagaactgaaccaactgccggcgtctaatttttcaatatctttggatagcatatcttgaatgggacctttaccgttggtagtacggtctaaagtttcatcatgcagattataaagtatattgtctttacttttgcgcacgtccacttctatccagccggctccatgtttcaatgcagctagagctgatggaatggtgttttccggcgctatatggttcgctcctctgtgtactacgatttcgatagagtcctggtacatcattttatgggcatgtataggaaatgggaataataccaagatggatgtcgcgatatgaagtaataagatttgatgacgtttcatgaattattttttgctttaaaggtttttataagagcttgccgtaacaagcccttataaaaacttatttaatttatcaataaccgtaattttgcttccagttggtgtttgaattcatcaagccgacagatacagggaagattctacgccatttctcggtcttggcttccggatgatattgatttttatatccccagtcgtcttcgaactttccaaaacggattaggtcattgcgacgccatgtttctgcgtaaaattcacgtgcacgctcttcaagcaactcgtccaatgaaggagaatgctccaataatggagcgttacagtagctgcgtatttggttgaacagggattgtggcgtatcaccgttcgtagctgttgctccccgtagaatagcttctgctttcattagcagaatatctgcataacggaagataggtacatcattgctttgattccggttatagaggttataatcgtctgcttgaatagcccatttgatgcatcggtatccctggcaccatgcgttcaagtcatttccaagatccatttggtcattcaagatggtgatattcttggtgaggacaacttgttgtccgttgtatatataaggttctgttcccattgtatgtgtgctgatgtcataatagttgatcgcacctttcatgatgatgtcattgcgttcatctccttccaggcaaaaacggtctgctgcttcaggagtgacgatgaaaacgcctccagcatttttggatagtgttataccgaacagtcctttgccgtccgcgccgtcattgttgaatttaggccagaattgaaaacgggcgtaagtattggctctggttgatgtttcattattttggtatggcattgcatagatgaaatctttgatctgatagccgttgtccggcatgaatttcttgcgataaccatcactgaggttgaaatgaccagaggcgatgatatcatcgcaatattttatgacatcattcaatttggaattagtcatgcttggatcataagtagctacatcatcacaggtataaacagcccagtttatatagagtttggcaaggagagcctcagccatccatttggttggcttgccataagtggaagcatcaacatcttcttttaaaccgccggaagccaaagcacgaagcaggtcgctttcgataaattttgtaatttcggaacggggagaacggtcgatagcttcagaatcgccgatcaaatggtctaatttgggagttgctccgaatgtatccataaaaataaaatgatagaaagcacgcatggcaagtgccggagcaatcaaggcttcttgttcggcattgttttcatcctctccacccaggtcaaaaattgcttgattgcactttgtgattgcagccggaatatcaccggcccagtccacgtgtgcgtctcctggaaggctggcatgaagagaggaatggatataattgccgccatcataccagttaccaccaaatgtcactgccatgaattcatcagaggacagcagggcagcttccatataacgacgtcctaatgctccgccgaatccataatacaaacctgccattttcgcttctttggcaatttcggaatccgggtattctgtataagtggatttaagatccacatctagatctgtgcaggaggagaaggtgaacagaccacctactagccaggttattaattttatgctatttttcatattagttttcaattatatggttagaaattcatgtttacaccgatcataaatgaacgggtacgcggatagtaattggtgcgtctgtccatacccggttccaagcctccaaggttgatttccggatcacgaccggagtaaccggtaatggtgaatacattattacaagtagcgtatagcttgagcgagtttatccagttaccaattttgccgaaagtatatcccaatgaaaccgaggacagacggaaataactaccgttctctatccagcgattggatggtgcttgagattgtgtgtctgtagcacggtgttcggtagctacgctttttaatacattgcggccttctttcacaaaagaaacattagagtattgttctgcagtggcgttgtagatatcttgtccaagaacaccagtaaagaataaatcgagattccagttcttgtattggaagttattgctccagcctaaatttaaatcaggttgtgcacagccggtaatagtacggtctctatcagtttcaggatctgtggtcgtttcgcctgtacgctcacccgtttcaggatcgtgtacataaaagatggatactccttggttattgtagccggcccattcgtaggtgtagaaggtgccgataggatgtccttccatgatgcgctgtacgtctgcatttgaagaataacctgcgatttcaggatcggctgcacggatataatctacggaatattcactgttggatatactttctacgttatttttattatgagataagttcaaactggtttgccaagagaaattttttgtttgtataggagtggcattaatggtaaattcaatacctttattgctgatatctcccacattggccggcatggttccgaaaggatagcggtttgtggaaacctcgtaagtgtatatcaggtcgctggtacgcttgtcatagtattcgatggttcctcctaatctgcctccaaagaagctgaagtccagcccgatgttcaacatggctgtacgttcccattttaggtctggattggcatttgaggcggctgccagggtatggtaactattctgtgtgccattggcgtttgtatagttgaaccaacctgaagtactgtaagtctggatagccgaataagctccgaatccgagtgagttaccactaacaccataaccaacacggaacttcaagtcatcgaaaacatttaaatctttgatgaacttttcttcgctcatacgccatgccaacgatgcagatggaaaagttccccaacggttgttctttccaaaagcagaggagccgtcacggcgaattgttgcttgaagcaggtatttgctgttgaaggagtagttgatacgtccataaaatgagatcatacgtaaagtttccaaatgaccgttattattgctggtgataccgccattctgccaatccattttattggcaaggttcagattataaaaggtggtgttatcattgtaaaagtcgtagacatccagaccgaaactgtcattgtcatcattctgttcccatgaataaccggccatcaggcccagtttgtggatattggcgaatgtatgatcatagtttatgtatgtttcaagaatttttttcttgttttctgttgcaatacgtttagcttcgccatttcgggtgttatattgggatttgctggtatggtattcgttccatatatattgttcgtcttgataggaaagacttaagttccatttcaagtccttagtgatatctaaagtacctttggctgttccttgaaggagtttcttgttattttcaaaagtatcttcattgatcatggatacaggattgaagttttgggagatagttttgtcgctataccaagagccgtctgcattggtgacaggaactagtggagaataataattcatggcatcgaatacggattggccatctttggcggaatcaacggtggtaccttttgattgtgcggcattcacattaaaggctaaggtgagccgatcattcagtgctttggtttgcaagaatgcgcggccgccgaaacgctcgaaatctgtaccacgtacgataccttgtttgttttgataactcatgctggcactgtattgagtcttttctgaaccgccattgatagaaacgttgtggttatgactgattgctgtgcgcagtacttcatcgttccaattggtgtttgctcctttgtcattcggaagagtgatgttattttccttggcataggtgcggagttcgtcggcagtcatcatatctaaacgcttggcaatgttgtcaaatgcaagatatgcgctgtagtttacagaagtgtgctcacttttactaccttttttggtggtaatcaagattacaccgttagcagccttggagccataaatagccgttgcagaagcgtcacgaagtacgtcaatgctttcaatatcttcgggagcaatcagacttaatgacataccgggaataccgtcaataacataataaggttccattgccgcaccggtacgcagagaagaagccccacgtaaagagatagaagctgtaccagaagtcgggtcgctgctttgtactaccgtcaaaccagggactttaccttgcaacaactgtccagggtcagaataaactcctacattcagtttgtctgctttcacagtggtaatggagctggttacatccttacgactcatactgccataacctactaccacaacttcatctaatgttttagaatcttcttccataataatcttcaaagaagatccttttactgtaatttcctgggtagtgtaacccacgtaagagaatacgagtgtctttccttgtgctacattcaatgtaaactgtccgttaaagtcagtgataacaccgttggtagtacctttttcgactacattcactccgataaggggttctccggtcttgtctgtgacaataccgttaacttgattttgagcaaatgccagtgtactgtttaataggagtaatgcaaagactactatctgtgcaaatgtcctttgggttagagattgtacgtttagcatagaatttaattttggttttgattaatatgttcttgtttaatactgcatagttctctatatattatgaattggttgttacagtttgatgtatattttcttaagatatagcggataaccgatacaccccaaaaacagagtgaaaacgagggcgtagacagctgaggcaaggtaggcgtcggttattcctgaatgaatggctgcataggctgccgccttccatccggtacttcccatcataatggcaagtacttcgctcagtacatagaggaatagggggttgacgccgaagatgatgaagaagcggcaccatttttgtttattccttatgtctatataatacattaatgtggcaagtgacatggaagccgctccgcaggtcaccagaacaaaagtaggagaccatattcttttatttaaaggcagcgcatctgccaacaaatagccgatactcatcagaatgaatccggtcaagaacaaacggagcactttgttttctgtctgatggctttgtattatccattttccacatgaaaaaccgatacaagtgtgggcgatagcagagagagtgcttacaaatccttccggatcaatcgggctcttctgatagagatgtgcttcgccgaaaagttgcctgtcaatgatggataaaatattgctttcatcgcaggtataaccgttccccatgcatgatatgacagtgtagcttaccagtaagataaaggttaatgtggggatgaacttatgattcataaatagggctgtaaaagaaataacacagtaacataaagcaatgcgttgtagtaccccggggatgcgcagatggacaaaaggcaggaagtcaccttcacatacatggtcaaaccaaccgattgcccatccgatgcatagaataagaaatgtgcgtttcaatatcttggttaccacttgtagggaaacgttgaaattgaatttgttcaatgaaatatatgttgaaatacccatgatgaacagaaagaaaggaaaaaccaagtcacaaggtgtcagtccgttccatgcagaatgttgtaaaggtgcatacgacactttgcctcctgcattgttaaccagaatcattcctgctacagtgatgcccctgagtgcatcgagtgacaaaagcctttttttaatgggcagtgcctgctgtgcggtttctgtatcgagttctttctttttcatcttactatcaattgtttatcaatgttatagcctctttcgctacttctatacaatcaccttcggcagatgccgcataggtgttctttgccagtgtccatggttcttccagggcataccaatctatggtcatggctggattatcggcagtgggggttgatgaattacctactggcagtacaggaagtttgccatccagttggtcttgcagtacttgccagtatttttcccaacgtttataataaaagtcgcgcagtagtccgttccattctttatgggcataatctcttaacttgccgatgtcggcgcagtaacggtttccccatgtggtaatttgtacgcgggcattccattcgtagaggtctttctcttcagatgtacttcctagattgcgcgcttgttgaatccagttccctactttgaattctttgcgtgtgcccaacagtttgtcttgcattatcagtagttccaagaactgtcgggtatgtgtggcataactttttttatcgaagcttttaaagtcggcaacagcgtaattgtacactattcgggcacggtcggcaatggcttgtcgggtgatatcaactagatcatattcaaagttgttgttaccgcgatatttgtgtgccacgctcaccatcaatcgtgcggcttctgctgtggtagtggggtcgtaatagttgcacattttgctccagctggatgcttggaaattattcagtgatgggcgcccgcaaaagatactttcgtgaggaccttgttggttgttgcctgccggacagttgtagataccgtttgccaagatttgccaagcttgccagatagattcatcgtctgtgccatagcgtgcgcggatgtattgttttatccattcttctttggtaaacttttctgcacgccaaggtagttcgcacatcagttcgaacataacgggattattttcaatgccttccattgtcagaccgatgccttttagctgagtggccagtgggttgtctttggtcaggtaaaaattatgaagaagttggtccatccttccatgcaaacccacgttcccaccgaaattttccaacaggcagaacaaccagttgtgttcttcgtatcctttgtctcgtttccatatagagggaatgccccacatgggacggcattcgctaaataaatcaaggatgagcagatcgccgggattcagcgctttcatcatttccgggcgtggattttctgtccatccctgcaccacccacacagcttttggattagcctttttcattgcatccataatagccctgccggctttgccgaagtctagtccggcaggcaagcttttggcttcatgaaaaggatcgatggagtagtagtcacttgttccatacagcttttcggtttcttcgtaaaaaaggctggcaatctgggtaaacttgggatcgtcgggcagtaagattcccggccggtcaaatccgttccatttgttgagagtgctttgggcggattccgaggagatgttgcttaatgttttctcttcttttccaccatcaatacgttttcccaaatccagtttggaggggatcatacccgagtaaccgggcagtacggggtgcattccccattctttcattcgtttcaatatctttttctgcaagtcttcttgctgtttataccaattatcggggttagggcctccccatccttccagattgttcatttcccaccaggcaaggaatgctggtccggcaataaaatcattgatttgctgtttggaaaatcctaagcggagtaataggttacgccacacacattcatgtcctacggcagcaagtggcaggttgatgccatgcagtgccatccaatccagttcctcttcccaacgtttccaatcccaaaatgccatggagtaggagtaggtgcagtaattgaaatcataacgcagggccagatttgtttcgtggcgttctttacggaagacgggaggaagaacattgggtagtgaggcatgcatactgttccatgacaggtggattccggcatgatactttaagtaccagttgattccggttgctatattaatataggtattgcctcgtatcactaccttgtcgcctttttggtccaactcgaaaaagtcatttgggcttttgtgtagttcgactacgaacttgtccgatgctcccttgtctatcctttccagcatttccttgatggggtttgccagtataccggaggggagtaatatcagccagctcaataataagaatgtgtttttcatatacatttgcatttctgttttttacaaatgtaagggaaacaaagctttttataggagaatatggtgcacaaatggagtaaaatagtaaagtgaactatttttttccaaaatattcgcttggaagtactccaaacagttctttgaagcattttgtgaaatatttagggtcgttaaaacctacggcatatgcgatttctgcaacagaaatgtcacattctactttggttaaagtgtcttttgccacatttaatcggtagtttctcatgaattgaccaatggattgccctgtcaaagattgtaatttctgattgactaaggttttgctgtatcccatatcgcggataaagcgctctaagttataatctgagtcggcataatgttctttcattaaattgattgccgatgtcataaatgtgttgtctttggaactagcgtttatattcaatgtttcacaattcatactagtggagaacatggatttgtatttctggcgtaaggcaagtatatttcggatacgtaatcttagaataacctcatcaaatggtttgcacagatattcatctactcctatttcatagctgattctttcttgggcttcagaccggagggcagtgagcatgagaaaggggatgtgggaagtagccagattagcttttacccggcgggataattcattcccgtccatgacgggcatcatcaggtcgctgacaatcaaatcaatcgtttctctttgaatcaagtaaagagcttctgcaccgttctgtgcttcttttaattgataattgtttttgagaatggaacaaatgtaagtacgcatatctgcattatcttcaacaatgaggatggtttcctttttctcgtttccattggcaggaatggaaagtggatgttcattctgctcatatttttctttttctgattcggcttgggggatacctttttccaaaggtaatagtattctgaaaaaagctccttgcttgggattgtttcctgcatagatgttgcctccgtgcagagaaatgattttcttacataagaatagtccgattcctgtgctgctttgtccataaacgggatatttgatgctctttttggattggtagaagcgttcgaaaatacgttctatatcttcgggtacgataccattacctgtatcttttatatctatgaacagccaggtatggttgtttttgtcggtaagggaagccacatacaaacttatttttccataatcgggagtgaatttaacagcattggatatcagattaataatggctttgcgcatatattcaacatcaaatatccaaaacggggtacagagccggaagtaggtgatgatgtttatgttccgttcatgggcaaatacttcgaaaggcattaatatattttgtataaggcggataaagttttcgtttgtcttatttaatacaactttgtctgcatctaactttctgaagtccattaattcattgactagtgatagcagataattggaattccgttcagctatttgtagctgtttctttacttccggctcatggctttcgtcaagggcgcgttggatgggaccgttgattaaagtgactggtgtccggaattcatgagtgatattggtgaagaaagcaattttttcttccgttacctcctcgacgtgtcgtgccattatttctagttgtttattttgtaactctagctcatgggtgcgttgggctacttctttttccagttgttttttctgttgacggtacagacttattttccattgataaaaataatagctgcctacggtgatcagaatggcaagcaataaatagaaccaccaggatttatagaaataaggagtgatggttactttgacttccgttattttatcggaccaatgtcctttctcgtctgtggcacggacttggaacacatattttccggagggaatgaaattgtatctagcagtatgttcgccaggaagggtttctgtccattcattctcataatttttcaagcggtaggcatatttcactcggttacagtttccatagtttaaggtggaaaactcgatggaaaaaccatgatctttttcgtgcagacggatggtatgtaaatttgttaccgcgcagggagtttttccgtctgctggaggatagaccatggtaccggcgacactgattgaggtcagtttgactttggcatcctgcttttttgtcttggctatatcgggggtgaaagcgactaatccgtttatagtaccgaaatataacaggttattttggggagaataataagatgcgttccaataaaactgattattgggcagtccgtcttcttttgtataattggtgaaagtcatggtttgtgtatccagttgggcgatgccgtggttggtggacatccacagatgtcccgttttatcttccacaatacctataatggtattattgggtaacccgtccttgcgggtgtagttatgaaatgtgaactgtgttccgttttcttccgctagttgatatagtccgttcccatttgcccccagccagatggtaccattatgatcttctatgatacagtttattttttctaattgcaatgaagtgggttccgtcagtttatgttttaaataggtatagctgaattgtgcggaggaaatggagaacgagtgtaaatccataatgaaaactccttcagatgttcccatccaaaggcgtttcttgcggtcgataatgatggaccctaccgcatcgaattcattgtcggaacggtcaaacaagacccgggtgaaacgcttggtctttttatggtagaaatgaagccctctggtagtaccaaaccataaaccattgttcatggtgtcttcacaggcgctgctcaggaaatctccttccagtcctatggagtcttcccggatatggcgttggaaagtttggttatgggggatgttcagatttagttcattgattccgactccccaagtatatgcccataaatgattttcggaatcaatgagaatgccacggatagagttgttactgatggaagtgggattgttctggtcaaaagtataatgaatgaactcatcgctgcctttgctctttttgttgagtcctccctctactgttcctacccatagatttccgtctttgtcttcgctgatggcattgaccggattgggggaaagagaggtttctcgaagatagttatattgccacacatacgtttgcagacaattgggagtcaataaattgattcctcctatctcggtccctacccagatattctcattgtcggtcagcaggcagttgatgaaattacagttcaacgacttgtcaggcatttcattgttttggcggatataagtaaaagtatcggtatctcgattgtatacattgagtccgttcagagtagaaacgatgacatctcctttgctagtcagtttaactccggttatataggcttgacttagcattccggggcgatgattggagtaacggtaccgtttcaaactctgccgggtatggttatacttgaagagtccgcgattggttcctatccataacaattccccgtcagtttccatgcagagaattctccagtcttctgaaaagggtttcagcagctccgataccatgctggttttcagtaagtggttgcttcctttttcaatacggcatacatgattatctatgcctgcacagatgtattcttgcaggtcaataacagcgtggatgggggattctgtatcttttttcagtttatagtaatcttttatttgcccgtttacgcctagttccagataccatagattcttgtctgtcgatatccacagattgtcctgcttgtcccgatagatggatgcaatgtagttacttgctagagatttcaattcggcaggcagttctttgtccgtgtctatctgtgtataatgtttcaagtcaatgaggtctattccttcttccgaccctatccagagtcgttgaaacttatcctcacagactttatgcacgtagtcgtttttcaagcgaatggagtgggattgggaattataatgaatgaattgatagccattataccgtcctattccattattagtagctacccagatatatccttgagtgtctttgtaaatatcattgatgaagttatggggtaacccagtatcttctgtaatgaagctgaaattatatcggttgaaaaagttatgtaagttttctccaaataagttcaatactcctcctgtaagtagaagaagtgctataatgtgcgttttcatattagtaattgtttcccaacaaatgtaaataatagtaagatagttccaaaacatttgagtggaaatcttgtatctgagagtaatataaggaaaatggcggctggagattacaatggaattacaaaagaatgtgatgaaggcttttatgatatgtatgataacaaaaaaggctcgctatctgcgaacctttgtgctcttcgtcttggacttgaaccaaggaccctctgattaacagtcagatgctctaaccgactgagctaacgaagaaaatttgcatttgactttaaaagtgctcttcgtcttggacttgaaccaaggaccctctgattaacagtcagatgctctaaccgactgagctaacgaagaaggtttttctctcaaatgcggtgcaaagataataggtttttccgaaatatgcaatatctttgcagaaaaattttagataaatggataaaataattggaatgggcaatgcattggttgacgttcttgttactttgcaagatgattcgctactagatgagatgagtttgcccaaaggaagcatgcaacttataaatgaagataagtttttgaaaatcagtggtaaatactctggtatgcaaacgcataaagctacagggggaagtgcgggaaatacagttttggcgttagctaacctaggggcacacccgggatttatcggaaagataggaaacgatgattttgggcaatattttaaaaaaaacggtttgaagcagggaattgacatgaaattgctcgccggtgatttgcctacaggagtggcttctactttcatttcaccggatggggaacgtacttttggaacttatctgggagctgctgctactatgaaagccgaaaatctgacgttggatatgtttaaggggtatgcatatctatatatagaaggatacttggtacaggatcatgaattgattcttcgtgctatgcaattaggaaaagaggctggattgcaaatctgcttggatatggccagttataatattgtggaaggggatttggaattcttcgatattttgataactaaatacgtggatattgtttttgctaatgaggaagaggcaaaggcttatacaggcaaggatgcatggggggctatcaatgaaattgcttctaaatgcagtgttgtaatagtaaaactaggtgcccaaggttcatgtataaagaaaggtacggaatgcatcaaactagaggtacctccggtaaaaaaagtcgtggataccactggcgcgggagattattatgcagcaggttttctgtatggactgacttgtggttattctttggagaagtgttccattataggttctattttagcatccaatgtgatacaagtggtgggtacaaccttatcaaagaaaaaatgggacgaaataaagttaaatatagaggcccttctacaggcttgaatagaataatgtattaatttgcggttcacaaatacataaagtgatgaagtggaatagtaagaaaatattgttaatgatttgcgtgggcctgacaggtagcgctttgtttagttttaataaaggtgatgaccgtaatttccagatagcaaaaaacttggatatcttcaatgcgatattcaaggaattggatatgttttatgttgatactattgatcctgagaaagtgataaaatatggtattgatgctatgttggcgcagaccgacccttacacggagtattatcctgaagaagataatacactaaaggaaatgactagcggaaagtttggcggtatcggatcggtaatacgttattatactccccgaaagcgtgtggctattattgaaccttccgaaggaagccctgctgccgaaataggactgaaagccggtgacatcatcatggagatcaatggaaaagatatggcccagggagatagaattcccaatgatctgacctcgtatgtcagtgataatttgcgtggtgagccgggaacaacttgtgtgttgaaagttgagagacctacttctgatagtacttatgtgccaatggaatttaaaataacccgttctaccatccgtacgaaccctgtaccttattatggaatcgtaggcaataatgtgggatatatcgttatcagtacttttgctatagagaactgttcaaaagatataaagaaggcattgatagaattgaaacagcaaggtgctaaatctattgttctcgatttgcgtggcaatggtggcggtttgttgggggaagcagtgaatgtagtgaatttctttgtgccgaaagggaaagagattgtggtaacaaaaggtaagattaaacaagctggtaccacttataaaacaatgaatgaaccggtagatacagagattccgctggctgtgctagtggacggttctacagcttcggcatccgagattgtttcaggttccttgcaggaccttgatcgggctattgtggtaggaagccgtacgtatggtaaagggttggtacaggtacctcgtgaattgccttataacagtagcatgaaagtgactactgcaaagtattatattcccagcggacgatgcattcaagccattgattacgctaaacgtaatgctgacgggtcggtggctcgtactccggacagcctgaccaatgtattccatacagcagccggacgtgaagtgcgtgatggtggcggtattcgtccggatgtggaggtgaaagttgaaaatttcccaaacattatgttttatctgcttaatgatgatatgatttttgattatgctacccaatattgtatcaagcattctcaggtaggggaagtgaaagactttacaataacagatgctgactatgttgattttaagaagatgttacataagcgtaagtttacttatgaccgtcaaagtgagaagatgctgaagaacttgaaagaaatagcggagtttgaaggatatatggatggggcaaaagaggagtttgccgctttggaaacgaaattgacgcataatttggatcatgagctggacaggttctcgaaagagataaaagatgctattgctcaggagattttgaaacgttattatttccaacgtggcgcgatattgcaacgcttgaaagatgatcctgatttgaaaaaagctattgagacattgaacaatcagtctgaatatagtaagatactttctgttatgaaataatcgaatgaggggcggatgtacgaatctgcccctcattattgtatcatgataccattgatgatgctttatttgaaccgggaagtatctattggtttatgctgtttttctttataccctccgaacttgtaggtaaaggataaagttatgttgcgtgaatagttgttggtgtgcatgtccatgtattgtcctttattacgtagtgtcacatctatgttgccttccatcgaattgaacagatcattggccttcacttggatacttgctttttggttggcaaagttccaacgtattccggtatggatggcccagatatgatttaaatcataacttccctggatagatgggctcaaataaagtccggtcagttccatgcgaatatccggtttggtagaaagtattatattattttgtaacatggcgagtccgatccacttgctgtggttgaaggaaagatcgaagaatttgttacattttgcttgacggtattcagcttgcagtgtgacgtgactgtccaaccaatgtccgattttgaagggaatgatagtcgtggctgagaaactttgctgataatcccagtttaaggttttgtaaatcaaagccaggcgttctgtgctttgataggctagttgctgaaataaatcgggttgataatcataagccaggctgaagatatacttgttctttaaaatataattcagatttgcggaataatcggtggatggctttaacattggattgccttgtacttcttcataaccacttatatagccggtactttcgctcagatcccagtagctgggataggacttatctgatgtgaatgaaagttgtagaatatgtgctggggtcattacgtatgttaattcagttgtaggataagccgcccatgcatgataacgggccgttttgtaatattctccggttatggacgcgctgaaagacaaatgttctcccatgtttttgctgaatccgacgtagaagtcatatgtatattcattataacgattgtttgtattgagttcgctcatgtctgttccgttttgggtatgatagaactgagtattatggtcactggcataagttaaagaggtgccatagtttaaggtccactctcgtggtagtgtgtgtgactggtctacgtatattttccagcggtctattgtttgtccgctagtcgtgtgaaattcgcttgtttggttcttgttgtctttgttggtgaattgctgatgactttcggaatggtaggaggtatagtttattccagctttcataccgaagctagagagataatctaaagcgatattgtgcattcgagtctccttttttgtccggttgtctgcggttgtgatgttcccgtcggaatatgaatgattatcgttgttagggttgaagacaccagtataggctagattgatatgagcattatcattgaatttatattcagcgcctgttcgtacataatgtgttattcctttcctgtcaatatcattgtgttgacagatatcatatatattattttttaaggtgtgatgtgagtacgtatctgttgtttgtctgttttgttcataatgggtattatatagcaagtctatattccatttaggagtggtgtaaagcaggctgattcctccttgtgtgccacttctgtaattgtatagatatccggcgttaacttctccttgcaacccactttcttcaggacggtaacctttcaaaagtaagttgatggcagcacctcttacatgatattgcggcggtgtgctatacataatttctgccttttctacacgtgaagccggagtgttttttaataaaatggtcaactgttcgtgactcattgttgtgggccttccgtttaaaataatgttcagattgtgtgtgcctgctaatgaaaggttgccgtttatttcctgtacaccgggtaattgctgaaggatttcataagcattgttcacgattctatgtgtggtgagttgtgacagatcatacgataattttccttcttccacttttacaagagggcgttcccctttgacgataacttcgtccaaagcataatctttacttttcagggtaatcgtgcctgcgtcttctcctgtagttgtcaataagagggtttcgtacatgatgtgttggaaaatcagccgataagatgctggttgccggttgaacctgaagtaaccggtggtatctgtgattacggcgtccacaaaagtagaatcaatggtttgtaggatgacggttgcaccgtcaatggcttgtgcatggatgtttgtaacctttccggtaatggtttgtgcagtggttgttcctataacccaaaataaaaatagcgatgtgatgataaaattttgctttttcatatctatttgtttttaatattttctttaactttgacgaaacaaaagtagggagacttttttccttacgtggttaatggcaggttaacacaatgttaacaaagtatggataggatataagtgtatgacaatcaaacatattcgttgggtagcttgtatcggactgttggcaatcatctgtttgcagtacgtttggcttgtaaatacctataagctaactaaggaaagtatacagttcagaagcaatgaagtatttagagatgcaacgatgcgtgaggtgttttatcgcatggaagtatatcaagattctttgcaaaagaagtataaggacaaagatacttccattatggttagaataaatctggatgaagattatgatttttttgaggatggcagaggggataaaaatgtgaaccaatggttgatgtccaatatgcaggtttccatgcaagaaattgtcaagagggattataaattgtctgtttctttgtcaagtttagattctatttatcggacaggccttgctgccgaaggattggatgcagaagtaataacttgtgtgacagattcgctggggaatattcttagaagttcccgttccatacaggtaggggattatggcttgttgaaaaccggattacaacctatcaattataaatgtacggagaatcttcaggcttttattgttaatccttattgggttattttccagcagatgaccttgctcctcattgctactgtcttgatgatggcaatgatcgtctattgtcttgtttatcagattcgtattattgctcatcagaataaaatagctaggatgcgtgaggatttctcatacgccatgattcatgagatgaagactcctcttgcctgtattttgatggggacccgaatgttgaaatcaggaaagttagatatttttccggataaacgcgagaagcattttcagatattggaagacgagagtgaacatttattgtcactgactaacaaagtgctgacgctgtcaaaattggaaaatgctcaattgaggctttggaaaaaggagatacaactccgtccgatgttagaggatcttattgagaaatatactgctaaggcagataaaccagtacatttctctcttcatttggaatcggaatgggtatatgctgatgaagaattcttgaaagaagctatcggtaatttggtagacaattctataaaatattcaggtgaagaggtggacatacagatttcatccttgcgtcaggactataacttttatttgataaaggtaagagataacggcataggtattccgttgaaggaccagagtcgtattttcgagaagtacgagcgtgcttcggctgccgaccgcagccgtaaaggcggtgcgtcaggcttcggattgggtttgaattatgtttttcgcgtggctgaagcgcatggtggaaaagtgtgtgtggaaagcattgaaggggagtatagtgaattttttctttttttgccgagtggggagaagaaataaatattttttaaggaggaagatgatatgataaaactgttgttggtggaagatgatgccaatctttgttatattattcgtggtggattggaggatatgataggtggatacgaggtgatgaccgcttctaatggcgaagaagggctgaagatatggaaggagcaacatcttgatatcattatttcagacattgagatgcctgttatggatggttatgaaatggtacgtcgtattcgggaaacggatggatttattcccattgtttttacctcgggcagggtttcgcctaaagatgtggtgaaaggttatgaattgggggtgaataattatattaagaaaccttttttggccgaagaactggatgcgcatattggtgctttgttgaaaatgaagcggggaatgggagccgctaatgaaagtgagatttatcggattggtgaaaattatacatttgatgctgttcatgcagtattaaagcattcgtcgtgtgtacaaaagacaatgacggaacgcgaagcgaaattgcttcagatgctttgtaaaaagaaaaatgaactagtgaggcgggatattattctttcaagactatgggatacggaggatgatttttttgcatcacgtagtctcgatgtttttgttactcgacttagaaaattgtttgctgatgatgaacggatacagataaagactgtgaaaggagtgggtttatgtctttcggacaaaggatgaatatgtgtaatataacatttattgtaagttcttttggcattttccagatactaaacgtttttaagcaactcgaaaagatgtgcattggtgaaatgaccgttcttgaaaatggattttgtcattattccgactttgttgaagccggccttttctaatactcgcatggaaggaaggttgtgttcaaagacaagtgcgaatatacgtattgtattcgtataagtgaagtaatggtagatggcttcttgtaatgcgtcggttacaataccttggttccaatatttttctccgataacataccctacttcagcattgaagcattccacatctgtgcctggtgtaaatccgatattgcctacggcttttccattaacttcaatacaaaaatcatgaatgccttcttttttctggatgaggtcaataaaggtttccgcatgctctagcctgtaagggtgggggaatacgttgcggcaattgtcccaaatctttttgttattcagttcttgaactaatgaatgagcgtcttctgtttgccaagtacgtagtgtgtacttgttcttttgtacaaatacagcatgatagcgtctcatgggggtactgcagagcccatggtaattttgtttttctcctacgacagcaaatcccaaactctggtagaaaggaatagcataagtagaagaattaaccgttgtttcaatggaaggatggagggtggaggcgtagtggaaaagtttttttcctaatccgtgcctgtgatattctggcttgataaaaaatagggagatatgtttaccattactttttatacctaaaatgcctgttagagcttcattgtcaaaactaccataaaatatgatttcgtttatacattttttgttataaataaagcttttgaaaaattccaatccctcattgttgaaatcttctttgccggtgatggtgaaaacttgccaagatagttcgatggcttttgggtattcatcttttgtgagttgtcgtatgttattcatggtatgccatattgtagattagtgtaaaaataggtagagcaggtatgttctttgtaaggtggagaaggataaaggtgcatttaaaaacaactttatccttctttgtctattaactagaaattataggctacgccaagattgaatacggcttggtctaggtcgctgattaattggtatttaatatcaaagtttaaactccagtttttgtctaagtcaaactccatacctgctcctaaattaactccaaattttccatcacttccactgacatcgtaatcgcctgctttccctaaatccaaatgccagttagtgtatgtaaatcctgctaatggatatagactaatattgcttgctatgggaaaaaggtagtggatatttgcgttgatgtcaaacatgctaagtccatcatttttaaagaagtaattcatagacggctctattctgatttgatcagtaatattatattgatatttcagaccaataccaacgctctctatttcagttccataacttagatttccaccaatagcttgtttcccttgttgtgcaaaaacagaaccacaacctaaaagtgccatgcatgcggcaataataatttttttcataatcactcattttaaatgaatactaacttttctttatatgtagaattatttttcttcctccttaaaccaggaagcatacattaaatatccattggctattttctgattgagttctttgctttgtgcctcgggaatctttttgataaatttggctggaactcctgcccataggcttccaggttcgatgacggtgttactgagtaccagcgctccggcagctacaatagctccttcacctacgaccgcatggtctagtatggtagagcccattccaattagagcgccgtcttttatagtcgcaccatgtatggttacattatgtcctacagaaacatcattcccgatttcgacaactgatttttgatataatgtatgtactacactgccgtcctggatatttacgcggttacctatgcggatagcattaacatcgccgcgtaatacggcgttaaaccaaatgctgcaatcttttccaattacaacatcgccaataatagtggcattatcggctaaataacagttctcgccgatttttggagtgaatcctctcactgattttataagtgccataattaatttctaccgttttaaaggagatgttacttcttttaaccactcgcgttcctcgttgttcaattccggattcaaacaattgtaaactttttcatgatattggttgaaccatgttatttcttcatcgctcagcatatctgtcaggatggcttctttgtcaatagggcagagggtaagtggctcgaatttatagtaagtgccgaattctgtctcttgtgacggaacaattaacatggtattttccgtacgtactccatggcgtccggttttatatataccgggctcgttggttactgtcatgcctggaacaagtaaggccggcatgtggttcatgcggaattggtgaggaccttcgtgtacattcagaaaacaacctacaccgtggcctgttccatgcaggtaattgattccggctttccacatagggaggcgagccagcgcatctagttgtgttccgcaagttccatgtggaaattgagccattgagagttggataaatccttttaagactaatgtgtaatctgttttttcttctttcgtgagtgctcctaaaacgatagtacgagtaatatcagttgttccgtccaaatattgtgctccactgtccagcagcagcatgccttcaggttttaagggaatatcggtttcgggggttgcttcatagtgaacaatagcgccatgagctttatatccggcaatggtgtcaaaactgataccattgaagtggggttgtccggcgcggaattcgtataatttcttatctatacttatttcggtttcatttccagtagaaacagctgctttcagccagcggagaaatttaaccatggctactccgtcgcgtttcattgcgcgatggaagccttctatttctgtctcattctttatcgcttttaaaaaaagtacaggcgaaggagctatttctattaaggaatgggcgcaggctgctgcatggacagcggcattgatattagctgacaacaggagcttgccggtaaaatcttttaaatctttttcaattgttgaataaggccttactttaatttcgttttctgttagatagtcttttacttcatctgacagtttattctctattatatataaggtagaactatattccgtgatgagaaggtaacttacaaataccggattgcagtgtacgtcacttccccgtaagtttagggtccatgccacttcatccagtgcggaaattaaaatgcctgtgcaactgttacgacggattgcttctcgtatttgagtgattttatccttgtaactgagaccggcatatttcaattcatgtataaacactttgttatcgggcaatgcaggccgatctgtccataattcattgaatggatcgggagcaagggttaagtgtatctgttttttttctaattctttctgtaagttgcttgtttcttgatagctgttcacccagccgtctatacccacattgtcttctgcattcaatacacagcccaaccactctacaatggaaggagtttccggtaatcgttccttgaataaagtaatacctgtgttttccaattgttcggccgcttgaagaaaatagcgtgaatctgtccaaagtccggctttatccagtgttacgacaaccgtacctgccgaacctgtgaaacctgatatccatttacgtgcttcccaatgtttggggatatactctcccgaatggggatccgtactgggaataataaaggctgaaagcttgtgtttacgcatgaaattgcgcagactagctattctatttataatttccgatttcattttaataggtttataatggtttgtactagaaagcaaagatacgatttctagattattttaaataaataattgcggaaagttttgtaaataaagaaagtatgtgtaattttgcgccgcaatttgactatcggaaaatattaataacaacatatttaataattaaaaacaatgattgtagtaccagtaaaagaaggcgaaaacattgaaaaagcgctgaagaagttcaaaagaaaatttgagaaaacaggtgttgtaaaagaactaagagctagacagcagttcgacaagccgtctgtattgaacaggctgaaaagagaacgtgctatctatgttcagaaacttcagcaagtagaagaataattaaaaactcgcacattctttgaataattgaattctttttcatatattcgttgctgaattgataagcgacgtttcttatgatgacagactcttttttggattatcttcgatttgaaaaaaactattctgaaaaaacaatagttagttatggaatagatttgaccaagttcgaagaatacttcaaggggaaagacgagaaagtcgattttacaacggtagatgctgatttggttcgtggttgggtgatgaacctgatggagaatggatatacatctgcttctgtaaaccgaaaactgagttcactccggtcgttttatcgtttccttctaaagaaaggtgtgatagaggaggatccgatgttgaaaatcattggaccgaaaaataagaaacctcttcctgtatttctgaaagaacgtgaaatggaccgactcttggatgatgttccttttaaggaggattttacaggttgtcgggatagaatggtgttggaaatgttttatgctacaggcatgcggctttccgagttgatagggctgaatgatgtggatgtcgatttttctgcgtttctgataaaagtaacgggaaagagaaataaacagcgtttaattccttttggagaagaattgcgaagggcgatgtctgtttatctgaaaataagaaatgaagtgttgcctggaaaggcagaggcgtttttcgttctaaaaaacggaaaacggatgtatcctggaaaggtgtatcttttagtgaaacggaacctgtcaaaagtggtgtcgttaaaaaaaagaagtccgcatgtgttgagacatacttttgcaactgctatgttgaataatgaggcagagttgggcgcagtgaaggaattactgggccatagtagtctgactacaacggaaatttatacgcatacgacttttgaggaacttaaaaaagtttatgaacaagctcatccaagagcgtaaaaaaggaggtatttatggaagttagaattcaagccattcatttcgatgcaacagaaaaacttcaggattttattcagaagaaaactgctaagttagaaaagtattgtgacgatataaataaagtggaggtgtcattaaaagttgtaaagcctgaaactgcgatgaataaggaggctagtataaaagtgctggtgcctaatggtgaattttttgcagaaaaggtgagtgatacatttgaagagtcggttgatgtatgcgtagatgcgctttctaagcaattgacaaaatataaagaaaaactacgcggtaaataaaaaaaaacaccgaaagtttttgagatttaaaataaatatctaactttgcagccgcttaaccattcaaggcggaatggttgcgaagttagatatgacaagcctctttagctcagttggccagagcacgtgatttgtaatctcggggtcgttggttcgaatccgacaagaggctcaagaaaagatgctgagaagctgttgttctttgaaagtaagttgggcaaataccagagtggccaaatggggcagactgtaaatctgctgtctttcgacttcggtggttcgaatccatctttgcccacattcttaagacttgaaaggtctttggttttttgcggaagtagctcagttgatagagcattagccttccaagctgagggtcgcgggtttgagccccgtcttccgctcttttttttcttgctgttatagctcagtggtagagcacttccttggtaaggaagaggtcacgagttcaagtctcgttaacagctctttgataacgtaattgctgattattaatcaaataaataacaagtaaagctatggctaaagagaaatttgaacgttcgaaaccgcacgttaacattggtactatcggtcacgttgaccacggtaaaaccactttgactgctgctatcactactgtgttggctaaaaaaggtctttcagaattgcgttctttcgattctatcgacaacgctcctgaagaaaaagaaagaggtattactatcaatacttctcacgtagaatatcaaactgcaaatcgtcactatgctcacgttgactgtccgggtcacgccgactatgtaaaaaacatggttacaggtgctgctcagatggatggtgcaattattgtttgtgctgcaactgatggtccgatgcctcagactcgtgaacacatcctgttggctcgtcaggtaaacgtacctcgtttggttgttttcttgaacaagtgtgatatggttgatgatgaagaaatgttggaattggtagaaatggaaatgcgtgaattgctttcattctatgatttcgatggcgataatactcctattattcgtggttctgcattaggtgctttgaatggtgttcctcaatgggaagataaagtaatggagttgatggatgcagttgatacttggattccattgcctccgcgtgatattgataaacctttcttgatgcctgttgaagacgtgttctctatcactggtcgtggtactgttgctacaggtcgtatcgaagctggtattatccatgtaggtgacgaagttgaaattcttggtttgggtgaagataagaaatcagttgttactggcgttgaaatgttccgtaaattattggatcaaggtgaagctggtgataatgttggtttgttgttgcgtggtatcgacaaaaacgaaatcaaacgtggtatgattttgtgtaagccgggtcaggttaaggctcactctaagttcaaagctgaggtttatatcttgaagaaagaagaaggtggtcgtcatactccgttccataacaagtatcgtcctcagttctacttgcgtactatggactgtacaggtgaaatcactttgccggaaggaactgaaatggtaatgcctggtgataacgtaactattacagttgagttgatctacccggttgcattgaatgtaggtttgcgttttgctattcgtgaaggtggacgtactgtaggtgcaggtcagattacagaactccttgactaatcactagataattaatatgatcagttctcggtcgtaagacaccgggaactgatttttacgggagtagctcagttggtagagcaccggtctccaaaaccgggtgtcgggagttcgagcctctcctcccgtgctaaacttgaaagaatatgtttcagaaagtagcaaattattgtaaagaatcttatgacgaattagtccataaagtatcatggcctactcgtaaagaactttctagtagcgcagtggttgttttatatgcttccctactcattgcgctagttgtttttcttatggattcagccttccagtttgtaatggaggatattatctatccgcactaattaattgaataaaatgtctgagattgaaaaaaagtggtacgtattacgtgctgttagtggaaaagaaagcaaggttaaggagtatcttgatgctgacattaagaacagtgatcttagcgagtatgtgtctcaggtgttgattcctaccgagaaagtgtatcaggttcgcaatggtaagaaaattgtgaaagaaagaagttatcttcccggatacgttttagtcgaggccgctttggtcggtgaggttgctcatcatttgagaaacactccgaatgtaatcggtttcttgggaggttccgaaaatccggttcctttgagacaatcggaagtgaatcgtatacttggtacggtggatgaacttcaggaaggtggtgaggaacttaatgtaccttataccgtaggagaaacagtgaaagttaccgttggaccgttcagtggcttcagtggtctcattgaagaggtgaataccgaaaaacggaagttgaaggttatggttaagatcttcggacgtaaaactccgctggaacttggctttatggatgtcgagaaagaataatgcattctgttacgtgcattggactttcgctataattaatatataaaaattagaaacaaaatggctaaagaagttgctggactaatcaaattacagattaaaggaggcgctgcaaatccatcacctcccgttggacctgctttgggttctaagggtattaatatcatggaattttgcaagcaattcaatgccagaacccaggacaaagcaggtaagattttacctgtaatcattacctactacgcagataagtcttttgattttgttatcaagactcctcccgtagctattcaattgcttgaattggctaagattaagagtggttctgctgagcctaaccgtaagaaggttgccgaaattacttgggaacaagttcgtacgattgctcaggacaaaatggttgacttgaactgcttcactatcgagtctgctatgactatggtagctggtacagctagaagtatgggtatcgctgtaaaaggggaattcccgggtaataactaataaacttcaattataatgggtaaactgacaaaaaatcaaaagttggctgcagaaaaaattgaagcagggaaagcatactcactgaaagaagctgcacagttagttaaagatattactttttctaagtttgatgcttcattagatattgacgtacgtttaggtgtagaccctcgtaaagctaaccagatggttcgtggtgtagtttcattgcctcacggaacaggtaagcaagtgcgtgttttggttctgtgtacacctgatgctgaagctgctgcaaaagaagctggtgctgactatgttggtcttgatgaatatattgaaaagatcaaaggtggatggactgatattgatgtaatcattacaatgccgtctatcatgggtaagatcggtgctttgggtcgtgttcttggtcctcgtggattaatgccgaatccgaagagtggtactgtaactatggatgtagctaaggctgttaaggaagttaagcaaggtaagattgactttaaggttgataagagcggtatcgttcatacttcaattggcaaggtttctttcactgcagatcagattcgtgataatgcgaaagaatttatcgctactatcattaaattgaaaccaagttcagctaagggtacttatattaagagtatttatctttcaagtactatgagtaagggtatcaagattgatcccaaaactgtagaagaaaactaacaataaggaggaatcatgagaaaggaagataaaggcgttattattggtcagttggctgaaaccgttaagcaatacggacatttctatttggttgacacaactgctatggatgcagctaagacaagtgaactgagaagaaaatgtttcaaagcaggtattaagctggttgttgtgaagaattctttgcttcacaaagctctgatgagcatggaaggtgttgatttctctccgttgttcgattctttaaaaggtacaacttcagtaatgtttagcgaagtagctaacgctcctgcaaagttgttgaaagaatacaaagaggaaattcctgcattgaaagcagcttatgctgaagaaggtttctatgtaggtgctaatcaactggatgctctttgcaacattaagagtaagaatgaagttattgctgatattattgcattgctgcaatcaccggcgaaaaatgttatttctgctcttcaatcaggtggtaacaccattcatggagttcttaagactctgggcgaacgtgccgaataatcaattttataatcaattagtaacaaacaattaaaatcatacaaaaatggcagatttgaaagcttttgcagaacaattagttaacttgacagtaaaagaagttaatgaacttgcaactatccttaaagaagaatacggtattgaacctgctgctgcagctgtagctgttgctgctggtcctgctgctggtgcagctgctgctgaagaaaaaacatcttttgatgtagttttgaagagcgctggtgctgcaaaattgcaggttgttaaagccgttaaagaagcatgtggtcttggcttgaaagaagctaaagacatggtagacggtgctcctagcacagtaaaagaaggcttggctaaagacgaagctgaatcactgaagaaaactttggaagaagctggagctgaagttgagcttaaataatattagcctgagtatcaggtaatacggttaggaatcctctggtagaggattcttaacctttttgtgtctatattattattaagttctacaaaatattaacaaatgtcttcaaatactgaaaatcaaagagttaattttgcttccatcaagaatccgatgaagtatccggatttcttggaagtgcaattgaagtcattccaagactttttacagttggataccccgcccgaaaagcgtaagaatgacgggctgtataaggtattcgctgaaaacttccctattgctgacactcgtaataactttgtccttgaattcttggactattacattgatccgcctcactattcaatagacgagtgtttggagcgcgggctcacatacagcgtgcctttgaaagcaaaactgaagttgtattgtactgatcctgatcatgaagatttcgatacggttattcaggatgtttatctgggtcctattccgtatatgactccgaaaggaacttttgttattaatggtgctgagcgtgtagttgtttctcagttgcaccgttctccgggcgtgttctttggtcagagcgtgcatgctaacggtactaaattgtactctgcccgtattattccattcaaaggttcatggatcgaattcgctacagatattaacaatgtaatgtatgcgtatatcgaccgtaaaaagaaattgcctgttactactctgttaagagctgtaggttttgaaaatgataaagatatcctcgaaatcttcaatttggctgaagacgttaaggttaataagactaacttgaagaaagtcgtaggaagaaaactcgctgctcgtgttttaaaaacatggacagaagatttcgtagatgaagacacaggtgaagttgtttctattgaacgtaatgaggttattatcgaccgtgaaactgtgattgaagaggatcatatcgatgaaattatagactcaggcgttcagaatatccttgttcacaaggaagaagcgaattcatccgactactctattatatttaatacccttcagaaagacccgagcaactctgaaaaagaggctgtactttacatttaccgtcagttgcgtaatgcagatccggctgatgatgccagtgctcgtgaggttatcaataacctgttcttctctgaaaaaagatatgaccttggcgaggtaggacgttacagaatcaacaaaaagttgggactgactacggacatggatgtgaaggtattgacaaaacaagatattattgaaatcattaagtatctgattgagctgattaactctaaagcggatgttgatgatattgaccacttgagtaaccgtcgtgtacgtactgtaggagaacagttgtccaatcaatttgcgattggtctggcacgtatgtctcgtaccatccgtgagcgtatgaatgtgcgtgacaatgaagtgtttactccgattgatttgattaatgcgaagactatttcttctgttatcaattcattctttggaacaaatgctttgtcgcagttcatggatcaaactaatccattggctgaaatcactcacaagcgtcgtttgtcagcgttaggacctggtggtctgtcacgtgaacgtgctggttttgaggttcgtgacgtacactatactcattatggtcgtttgtgtccgattgaaactcctgaaggtccgaatatcggtttgatttcttctttgtgtgtgtatgctaagattaatgaacttggctttatttcaactccttatcgtaaagtagctgatggtaaggtggatatatctgatgaaggtattgaatatctgacagccgaagaggaagaggataagataatcgctcagggtaatgctccattggatgatgaaggcaaatttgttcgtgagaaagtaaaagctcgtcgtgatgctgattatcctgttgttactcctgaccaggtagagttgatggatgtttctccacagcagattgcttctatcgctgcttctttgattccgttcttggaacatgacgatgctaaccgtgcattgatgggatcaaacatgatgcgccaggcagttcctttgttgcgtacagaggctcctattgtaggtacaggtattgaaaaacagttggttgaagactctcgtactcagattgcagcagagggtgatggtgttgtagaatatgtcgatgcaacaactattcgtatcttgtatgacagaaatgaagatgaggaatttgtaagctttgaacctgctttgaaggaatacagaattcctaaattccgtaagactaatcagagcatgaccattgacctccgtcctacttgtgataaaggacagcgtgtgaagaagggtgatatcctgactgaaggatattcaactcagggtggtgagcttgcattgggtaaaaacctgttggtggcttatatgccttggaaaggttataactacgaggatgctattgtattgaatgaacgcgttgtacgtgaggacttgctgacttctgtacacgttgatgaatatattttggaggtccgcgaaacgaaacgcggtatggaagaattaacttctgatattcctaacgtgagtgaagaagctactaaagatttggatgaaaacggtattgtacgtgtaggtgcacgtatcgaaccgggtgatatcctgattggtaagattactccgaaaggtgaatcagatccttctccggaagaaaaattgcttcgtgctattttcggtgataaggcaggtgatgtgaaggatgcttcattgaaagcttctccgtcattacgtggtgtcgttattgacaagaagttgttctcacgtgttatcaagagcagaagtgagaagaatgccgataaggctattctgcctaaactgaatgatgaattcgaagaaaaggcagcaaaactgaaagatatcttgattgagaaactattggttttgactaatggtaaggtttcccaaggagtgaaagattatttgggaacggaagttattgccaagggggcgaagttcaccaaacgcgatttggaatcattggattatactattatccagttgagcaagtggacagctgatgctcataagaatgacatgattcgtgacttggtgatgaattatttgaagaaatataaagaattggatgctgaattaaagcgtaagaagtttgctatcactatcggtgatgaacttcctgcgggcattattcagatggctaaggtttatattgccaagaagcgtaagattggtgtaggtgataagatggcgggacgtcacggtaacaagggtattgtttctcgtgtggttcgtcaggaagatatgccgttcttagcagatggtactccagtagatatcgtattgaatccgttgggtgtgccttctcgtatgaatattggtcagattttcgaagccgtattaggtcgtgccggaaaagagttgggtgtgaaatttgctactcctatttttgacggtgcttctatggatgatttaaatgaatggacagataaagctggattgcctcgttattgtaagacttatctttgtgatggtggtacaggcgaacgctttgaccaacctgcaacagtgggtgtaacttatatgttgaaactagggcatatggttgaagataagatgcatgcccgttctatcggtccgtactcccttattactcagcagccgcttggtggtaaggcacagttcggtggtcagcgtttcggagaaatggaagtttgggcgcttgaagcattcggcgcagcacatatcttacaggaaatcctgaccattaagtctgatgacgttgtaggacgctcaaaggcttacgaagctattgtgaaaggtgaacctatgccaactccgggtatccccgaatctctgaatgtattgttacacgaactgagaggtcttggcttgagtatcaaccttgaataataaaaaaatataactctttacattataaataaggaagtatggcttttagaaaagaaactaagataaagagtaatttctcgaaaatctcaattggcttggcttcacccgaagaaatccttgagaattcgagcggtgaggtgttgaagcctgaaacgatcaactaccgtacctacaaaccggaacgtgatggtttgttctgcgagcgtattttcggtccggtgaaagattacgaatgtcattgcggtaagtacaaacgtatccgttataaaggtattgtttgtgaccgatgtggcgttgaagtgactgaaaagaaggtccgtcgtgaacgtatgggacatattcagttagttgtgcctgtagcgcatatctggtattttcgttcattgccgaacaagatcggttatttgttggggctgcctacaaagaaactagacgctattgtatattatgaacgttatgtggttatccagccgggtgtgaaggctgaagatggcattaataaatatgatttgctttctgaagaagagtatttggatatcttggatacacttcctaaagaaaaccaatatttggaagatacagatccgaataagtttatagctaagatgggagcagaagccatttatgatctgctctcaactttggatttggatgctttatcttatgaattacgtcataaagcaagtaatgattcttcgcagcaacgcaagaacgaggctttgaagcgtctgcaggtagttgaatcgttccgtgcatctcgcggacgtaataaacctgaatggatgattgtacgtattgtgccggttattcctcctgaactgcgtccattggttccgttggatggtggccgtttcgctacctctgacttgaatgacttgtatcgtcgtgtgattatccgtaacaaccgtttgaagcgactgattgaaatcaaggctcccgaagtgattttgcgtaacgaaaaacgtatgttgcaggaggctgtcgattccttgttcgataactcacgtaaatcaagtgcagtgaagactgacgctaatcgtccattgaaatcactgtccgatagcttgaagggtaagcaaggacgtttccgtcagaatttgctgggtaagcgtgttgactactctgctcgttcggttattgttgttggtcctgaattgaagatgggtgaatgtggtatccctaaactgatggctgcagagctttacaagccgtttatcatccgtaagttgattgaacgtggtattgtgaagactgtaaaatctgcaaagaagattgtagaccgcaaggagcctgtgatctgggatatcttggaacatgtcatgaaaggtcatcctgtattgctgaaccgtgcgccgactctgcaccgtttgggtattcaggctttccaaccgcatatgattgaaggtaaagctattcaattgcacccgttggcttgtacagcgttcaatgccgacttcgatggtgaccagatggcggttcacttgcctttgagtaatgatgcgattctggaagcacagatgttgatgcttcaagctcataacattctgaatcctgctaatggtgctcctattactgtgcctgcacaggatatggtacttggtttgtattatattaccaagctgagaaaaggggctaaaggtgaaggcttgactttctacggtccggaagaggctttgattgcttataatgaaggtaaagtggatattcatgctatcgtcaacgtagtggtgaaggacttggacaaagatggcaaaatcgtagatgtgatgatgaaagaaacctccgtagggcgtgtgattgtaaatgaaatcgttccagcggaagtggggtacttgaataccattatttccaaaaagtctttgcgagatatcattagtgatgttatcaaagctgtcggtgttgcacgtgcttgtgaattcttggatggtattaagaacttaggttactatatggcgttcaagggtggtctgtcattcaacttgggtgatattattatcccgaaagaaaaagaagaactggtaaaacgtggtaatgaggaagtggaacagattatgatgaactataatatgggtttcattactgacaatgaacgttataaccaggttatcgatacatggactcacgtgaacagtgacctgtctgatatactttacaagacgattaagaatgatgaccaaggcttcaattcagtatttatgatgcttgattccggggcccgtggttctaaagagcagattcgtcagttgtctggtatgcgtggtttgatggcaaaaccgcagaaagccggtgctgaaggcgcacagattattgaaaaccctattctttcaaactttaaagaaggtttgtctgtgttagagtattttatttctacccacggtgctcgtaaaggtttggcggatacagcgttgaagactgctgatgcgggatacttgacccgccgtctggtagacgtgtcgcatgatgtgattatcaatgaagaagactgtggaacacttcgtggtttggtttgtacggctttgaagaataacgatgaagttattgctactttgtacgaacgtattctaggacgtgtttctgtacatgatatcgtccatcctactactggtaaactgattgtagccggtggagaggagattacagaggatattgcgcaggaaatcgaggattctccgattgaaagcgttgaaatccgttcggtattaacttgtgaatctaagaaaggggtatgtgctaagtgttatggacgtaacttggcatccagtcgtatggttcagaaaggtgaagcagtcggcgtaatcgctgcccaatctattggtgagccgggtacacagttgacattgcgtacattccatgccggtggtatcgcaggtaatatggctgctaatgcaagcattgtggccaagaataatgcacgtttggaattcgaagaattgcgtacggtagatacggttgatgaaatgggtgaggctgtgaaagtggtagtcggtcgtttggctgaagtccgctttatcgatgtgaatacagggattatcctgtcaactcataatgtgccttatggttcaaaattatatgctgcggacggtgatattgttgagaagggaaaactgattgctaagtgggatccgttcaacgctgttattattacagaggctactggtaagattgaattcgagagtgtggttgaaaacgtaacttataaggtagagtctgatgaagctaccggtttgcgtgaaattatcattatcgagtctaaggataagacaaaagtaccttctgcccatattgtaaccgaggatggtaatttgatccgtacttataacttacccgtgggggggcatgttgtggttgaaaacggtcaggcagtgaaagctggtgacattattgtgaagattcctcgtgctgtaggcaaggctggtgatatcactggtggtcttcctcgtgttacagaactgtttgaggctcgtaacccatctaatcctgctgtcgtttctgaaatagacggtgaaattactatgggtaagattaagcgtggtaaccgtgaaattattgtcacatctaagacaggtgaagtgaaaaagtatttggtgaatctgtctaaacaaatattggttcaggagaatgactacgttcgtgccggaactccgttatctgacggtgcgattactcctgctgacattttggccattaaaggtcccacggctgtacaggaatatatcgtaaatgaagtgcaagacgtttaccgtttgcagggtgtgaagattaacgacaaacactttgagattattgttcgtcaaatgatgcgtaaggtagaaatcgatgagccgggcgatactcgcttcttggaacagcaggtagtggataagcaagagttcatggaagaaaacgatcgtatttggggcaagaaagtagttgttgactctggtgattctcagaatttacagccgggtcagattgttactgcccgtaagttacgtgatgagaacagtatgttgaaacgtcgtgatttgaagcctgttgaggtacgtgatgctattcctgctacatctactcagattctgcaaggtattacccgtgccgctttgggaacttcaagtttcatgtctgctgcatcattccaggaaacaacgaaagttttgaatgaggctgccatcaatggtaaggttgatagattggagggtatgaaggagaatgtgatttgtggtcacttgattcctgccggtaccggtcagcgtgaattcgaaaagattattgttggttcgaaggaagaatatgatcgcattcttgctaatcgtaagaatgtactcgattatagtgaggtagagtaatttttaatacatacactgtaaaagaggctgatttctgtttaagaaatcagcctctttaggtttatagtaaatgctataggaaaattatatagaataatcagtatgttgtattattacaaataaatgtctatatttgtactccaaccaaagaatagaagttggggaccttgaaattcagaatatttttttaatgctaaagtataaaatcatggaaaacgaaaaaaataacaatcagttgcagatagagttgaaagaagaagtagctcaaggaacgtatgcaaatcttgccattattacccattccagttcggaatttattgttgattttgtgcgtgtaatgccgggattacctaaagctggagtgcagtcacgtattgtactgactcctgaacatgcaaaacgtttgatgtatgcattacaggagaatgttgcaaaatacgaacgtaattttggacctattcgaatgccggaagaaatgaatgggggaaataatggaccggatggaaaaacattcattcctcctataagcggatttaaaggggaagcataagggcttttgtagcaaaaataacatagtagtctgtttttcaaaaacttttttgagaaacagactatttttattagtagaaagtattgtttattaaaatgttattcgtaactttgcagcccaaaatgtatagttttggacttagtacagcaaattaataaacaatatataataattaaaaatcaaacaaaatgcctactattcaacaattagtaagaaaaggaagagaggttttggttgagaagagtaaatctccggcactggattcatgtcctcaaagacgtggcgtttgtgttcgtgtgtatactactactccgaaaaagccgaattcagcaatgcgtaaagttgctcgtgtgcgtctgactaactctaaggaagtaaactcttatattccgggagaaggtcataacttgcaggaacactcaatcgtgttggttcgtggtggtcgtgtgaaagaccttccgggtgtacgttatcacatcgttcgtggtactttggatacagcaggcgtagctggtcgtacacaaagacgttctaaatatggtgcgaagcgtcctaaagcaggacaagctgcagctcctgcaaaaggaaaaggaaagaagtaaattgtaactgaattcctgaaacaaagaatattaatttaagttttggtttgttggaataagctataaaggttgagtaaatgcttcagaggaagcgttgaagtaaacggaaaaagtgcagccccaaacaaaaacattattttgagaaaaaatgagaaaagcaaaaccaaaaaaacgtgtgatccttccggatccggtatttaatgatcagaaggtttctaaattcgtaaatcacttgatgtatgatggaaaaaagaatacatcttatgagatcttctatgcagcactggaaacagtgaaaacaaaacttcctaatgaagaaaaatcagctttggaaatctggaagaaagctttggataatgtaactccgcagattgaagtaaagtctcgtcgtgtaggtggcgctactttccaggttcctactgaaattcgtcctgatcgtaaagagtcaatctcaatgaaaaacttgattcttttcgctcgtaaacgcggtggtaaatcaatggcagataaactggcagctgagattattgacgctttcaacgaacagggtggtgcttataagcgtaaagaagatatgcaccgtatggctgaagctaaccgtgcattcgctcactttagattctaatcaagtaataattaataagtaaaggacgaagatggctaaacatgatttgcatttgacccgcaatatcggtatcatggctcacattgatgctggtaagacaacgacttcagaacgtattttgttctacactggcttgactcacaaaattggtgaggtgcatgatggtgcagcaacaatggactggatggagcaggagcaggaacgtggtattactattacatctgctgctactactactcgttggaaatatgcgggaaatacttataaaataaacttgattgacactccgggacacgttgactttactgctgaagtagaacgttctttacgtgtcttggatggagctgttgcagcttattgtgcggttggtggtgttgaacctcagtcagaaaccgtatggcgtcaggctgataaatacaatgtgcctcgtattggttacgttaataaaatggaccgttctggtgctgactttttcgaagttgttcgccagatgaaggatgtattaggcgcaaatgcttgccctgtggtaattcctattggtgctgaagagagcttcaaaggagttgttgatttgatcaaaatgaaagctattttgtggcacgatgaaacaatgggtgcagattatagcgtagaagaaattccggcgaacttggttgatgaagctaatgaatggagagagaaaatgctcgaaaaagtggctgaatttgacgatgctttaatggagaaattctttgatgatccttctacaatcactgaagaagaaatcttgcgtgctttgcgtgcaggtacattgaaaatggatatcgttccgatgttctgcggctcttcattcaagaataagggagttcagacattgcttgactatgtttgtgcgttcttgccttctccgttggatacacctgctattgtaggtactaatccgactacaggagcagaggaagaccgtaaacctagcgaggatgaaaaaacatcagctttggcatttaagattgcaactgacccctatgtcggacgtttgactttcttccgcgtttactctggtaaggtagaggctggttcatatatctataacactcgttcgggtaaaaaagaacgtgtatcacgtttgttccaaatgcactcaaacaaacagaatcctgtagaggtgattggagctggtgatattggtgccggtgttggtttcaaggatatccgtacaggtgatacgttgtgtgatgaagatgcaccgatcgtattggaatcaatggaattccctgatcctgtaattggtattgcagttgaacctaagactcagaaagatttggacaagttgtctaatggcttggctaaactggctgaagaagacccgacatttactgttaagactgatgagcagtccggtcagactattatttccggtatgggtgagcttcatttggatattattatcgaccgtctgaaacgtgagtttaaagtagaatgtaaccagggtaaacctcaggttaactataaggaagctatcactaagactgttgaattgcgtgaagtttataagaagcagtctggtggtcgtggtaagtttgccgatatcattgtggcaatcggtccggttgacgaagactttacacaaggtggtttgcagtttattgatgaagtgaagggcggtaatgttcctaaggaatttatcccatcagttcagaaaggtttccagaccgcaatgaagaatggtgtgttggcagggtatccgcttgattcactgaaagtagttttgaaggatggttcattccatccggttgactctgaccagttgtcattcgagatctgtgctatccaggcttacaaaaatgcatgtgctaaagcaggtcctgtattgactgaacctattatgaaactggaggttgtaactcctgaagaaaacatgggtgatgttattggtgacttgaataagcgtcgtggtcaagtagaaggtatggaatcaagccgttctggagctcgtattgtaaaagctaaagtacctttggcagaaatgtttggttacgtaacagctttgcgtactattacttcgggtcgtgctacatcgtctatgacttatgatcatcatgctcaagtttccagctctattgctaaggctgtacttgaagaagtgaaaggtcgcgtagacttagtataataaaaaaaagcaggggctacgggttagcgaatgactcttaatccggccccactttatatttaatcattttttaatttaaaatttaatgagtcaaaaaattagaattaaactgaaatcttacgatcacaacttggtagacaagtctgctgaaaagatcgttagaacagtgaaggcaacaggtgctattgttagcggtcctattccattgcctacacacaagcgtatttttacggtaaaccgttcgactttcgttaacaagaagtcacgtgaacagtttgaattgtcttcttacaagagattaatcgacatctatagctcaacagctaagacagtagacgctctgatgaagttggaattaccgagtggagttgaagtagaaattaaagtttaatgcatttaaaaattaactgaaatgccaggattattaggaaagaaaatcggaatgacatccgttttcagtgctgatggtaaaaatgtaccatgcactgttatcgaagctggtccttgtgtagttactcagattaagagtgttgagaaagacggctatgcagctgttcaggtaggtttccaggacaaaaaggaaaagcatactaccaaacctttgatggggcactttaaaaaagctggtgtaactccgaagagacacttggccgagttcaaagattttgaaacagaattgaatttgggagacactattacagtggagttgttcaatgatgcggcttatgttgacgttgttggtacttctaaaggtaaaggcttccaaggtgtagttaaaagacatggatttggtggagtaggtcagactactcacggtcagcacaaccgcgctcgtaaaccgggttctatcggtgcatgttcttaccctgcaaaagtattcaaaggaatgcgtatgggtggccaaatgggtggtgaccgcgttactacacataacttacaggtattaaaagtgattccggaacacaatcttcttttgattaaaggttcggtaccgggttgcaaaggttcaatcgtaataattgagaaataatggaagttaacgtattaaatattaaaggtgaagacaccggaagaaaggttacgttaaacgaatctatcttcggaattgaacccaatgaccacgctatctatttggacgttaagcagtttatggctaaccaacgtcagggaactcataaatctaaagaaagaagcgaaatcagcggttctactcgtaaattaggtcgtcagaaaggtggtggcggtgctcgtcgtggtgatatcaactctccggtattggtgggtggtgctcgcgtgtttggtcctaaacctcgtgactattggtttaagttgaataaaaaagttaagacattggctcgcaagtcggcattgtcttataaagctcaagaaaacgcaatcattattgttgaagacttcacatttgaggctccaaagactaaggatttcgtttctatggtaaataatcttaaaattgctgacaaaaagttgcttcttgttttgccggaagctaataaaaatgtatatttgtcagctcgtaacatcgaacgtgctaatgtagcaattgcttctgcattaaatacttacaatgtattgaatgctgaaactcttgttgttacagaaaactcgctcaaggctatcgagaatatcttatcttaatttaaaaaggaggcttagataatgggaattattattaaaccgttggttactgagaaaatgactgcaattaccgagaagttaaatcgattcggctttattgtacgtcctgaagctaacaagttggaaattaagagtgagattgaagctttgtataatgttacagtagtagatgtaaatacgctaaaatactcgggaaagagtaaaagccgttacactaagtctggaatcatcaatggtcgtacgaatgcttataagaaagctatcgtaacattgaaagaaggcgatactattgatttttatagcaatatttaataaagatggcagtacgtaaatttaagcccacaacaccggggcaaagacataaaattattggtacttttgaagagattactgcatcggtaccagaaaagtctcttgtatttggaaagcgctcaacaggtggtcgcaacaacgttggtaaaatgacaatgcgctatatgggcggtggtcacaagagaaaatacagacttattgatttcaagagaaacaaagacggtgtacccgcagttgttaaaactatagaatacgatccgaatcgttcggctcgtattgctttgctgttttatgctgatggtgaaaagagatatattattgctcctaatggattgcaagttggtagcacattgatgtctggagcgaatgcagcgcctgagattggtaacgcacttccgcttgaaaacatccccgttggtactgtaattcataatatagaattacgtccgggtcaaggtgcagctttggtaagatcagctggtaattttgctcagttaacttcaagagaaggcaagtattgtgtgattaaattgccttcaggtgaggtaagacaaatacttagtgcttgtaaggctactattggtagcgttggtaactctgatcatggattggaatcttccggtaaggcaggtcgtactcgttggatggggcgtcgtcctcgcaaccgtggtgttgttatgaatcctgttgatcacccgatgggtggtggtgaaggacgcgcttcaggaggtcatccaagatcacgtacaggcttgtatgctaagggcttgaagacaagagctccgaagaaacagtcttctaagtatattattgagagaagaaagtaataactgattaattgagtaaattatgagtcgttcattaaaaaaaggtccatatattaacgttaaacttgaaaagaaagtgcttgctatgaatgaaagcggcaagaaggttgtcgttaagacttgggctagagcttcgatgatctcgcctgattttgtagggcacacagttgcagttcataacggaaataaatttattcctgtttacgttacagaaaacatggtaggacacaaattgggtgaatttgcaccgacacgtacattccgcggccatgcaggtaataagaaaaaataagcaggataatctgaagaaataataaagtaataaataatgggagcaagaaaaaaaatatcggctgaaaaaagaaaagaagcccttaagaccatgtattttgcaaagttgcaaaatgttcctacttctccgcgaaaaatgcgtctcgtggctgacatgatccgtggtatggaagtgaaccgtgcactgggtgtcttgaagttttcttctaaagaagcttctgcaagagtggaaaaactgttgcgctctgctattgctaactgggaacagaaaaacgaacgtaaggcagaaagtggcgaattgtttgtaacaaagatttatgttgatggtggtgcaacgctgaaaagaatgcgtccggctccgcagggaagaggttacagaattcgtaaacgttcaaatcacgtgactttgttcgttgattctaagagtactaatgataatcaaaattaagactagatgggacagaaagttaatccgataagcaaccgtttaggaattatcagaggatgggattctaattggtacggtggcaatgattatggtgatgctttgttggaagacagcaaaatccgtaaatatttgaatgccagacttgcaaaagccagcgtttcaagaattgttattgaacgtacactgaaattggtgacaattacggtttgtacagcacgtccgggtattatcattggtaaaggcggtcaggaagttgacaagctgaaagaagagttgaagaagatcacggacaaagatattcagatcaatatctttgaagtgaagagacctgagttggatgctgttattgtagctaataatatcgctcgtcaggtagaaggtaagattgcctatcgccgtgccatcaagatggctatcgctaacacaatgcgtatgggcgctgaaggtatcaaagtgttgatttcaggacgtttgaatggagcagaaatggcccgttctgaaatgtataaagaaggaagaactccgttgcatactttccgtgcagatattgactactgtcatgcagaagctttgactaaagttggtttgctgggtattaaagtatggatttgccgtggtgaagtgtatggtaagagagaattagcgcccaactttactcagactaaagagagtggtcgtggtggtaatggcaacaataacggtggtaagaacttcaaaagaaagaaaaacaatcgctaacggatttgaattttaggaattatgttacaaccgaaaaagacaaaattcagaagacagcagaagggcagtcagaaaggaaatgctcaaagaggaaaccaattggctttcggctcatttggtattaaatctttggagactaaatggattacaggtagacaaattgaagctgcacgtattgcggtaacaagatatatgcaacgtcaaggacagatttggatccgtattttcccggacaaacctattactcgcaagcctgctgatgtgcgtatgggtaaaggtaaaggtgctcctgaaggtttcgttgctccggttactccgggtcgtattatcatcgaggcagaaggtgttccttatgaagtagctaaagaagctttgcgtcttgcagcacagaagcttcctgttactactaagtttatagttagacgtgattacgatgctcaaaatcaaaatgcttaatttattatgaagattgcagaaattagagaaatagctaccaatgaattggcagaaagaattgaagctgaagtagccaattacaatcagatggttttaaatcattctatctctccgctggataatcctgcacagattaaaaagttacgcagaacgattgcgcgtatgaaggcagaattgcatcagagagaacttaacaaataataatggtcctcatggaagctagaaatttaagaaaagaaagaacaggtgttgtagtaagcaataagatggataagaccattactgttgctgctaagtttaaagaaaaacaccctatttatggtaagttcgtttctaaaacgaaaaaataccatgctcatgatgaaaagaatgaatgtaatgtaggtgatacagtacacatcatggaaactcgtcctttgagcaaaactaagagatggagattggttgaaataattgaaagagctaagtaattatgatacaagtagaatccagacttacagtgtgtgacaacagtggcgctaaagaagctctttgtatccgcgtattaggcggtacgaagagacgttacgcttctgtaggggatgtcattgtagtttctatcaagagtgtaatcccctctagtgatgttaaaaaaggtgcagtatcaaaggctttaattgtacgtactaagaaagaaatccgtcgtgctgatggttcttatattcgttttgatgataatgcttgcgtattgttgaataatgcaggtgaaattagaggaagtcgtatttttggccctgttgcaagagagttgcgtgctgcaaacatgaaagtggtatcacttgcacctgaagtactttaattttgtaaaagatttaagtaatgagtaaattacatataaaaaaaggcgatacagtttacgtaaactctggtgaagataaaggtaaaactggccgtgtgctgaaagttcttgttaaagaaggacgtgcacttgtagaaggtatcaatatggtatcgaaaagtaccaaacctaatgcaaagaaccctcagggtggtatcgtaaagcaggaagctgctatacatatctcaaacttgaatttggttgatcctaaaacaggcaagccaacacgtgtgggaagaagagaaagttctgatggtagaacatttgttcgttatgctaaaaaatcaggagaggagattaaataatgagtaatactgctagccttaagaaagaatatgcagagcgcattgcgcctgcattgaagaatcagttccaatattcttcaacaatgcagatccccgtacttaagaagattgttatcaatcaaggattgggtatggctgttgctgataagaagattattgaagttgctattaatgagttaacagcaattactggtcagaaagctgttgcaacagtttcacgtaaagatatcgctaactttaagttacgtaagaaaatgccgattggcgtaatggtgactttgcgtcgtgaaagaatgtatgagttccttgaaaaacttgttcgtgttgctttgccacgtattcgtgacttcaaaggtatcgaaagcaagttcgatggaagaggtaattatacattgggtattcaggaacaaatcattttccctgaaataaatatcgatagtattactaaaattctcggaatgaatattacctttgtaacttctgctccgacagatgaagaaggttatgctttgttgaaggaatttggtttaccgtttaaaaactcaaaaaaagattaatatattatggcaaaagaatcaatgaaggctcgtgaagtaaaaagagccaaacttgtagccaaatatgctgaaaaacgtgctgcgttgaaaaagattgtcaactcaggtgatcctgctgaagcttttgaagctgctcagaaattacaggctattcctaagaatgctaatcctattcgtttgcacaaccgttgtaaattgaccggtcgtcctaaaggctatattcgtcagttcggaatttcaagaattcagttccgcgaaatggcttctaatggtttgattccgggcgtaaagaaagcaagctggtaattctttttatttttaaatattgtcagggtagtcctgattaatttaatttattattatatgacagatccaatcgcagattatctcaccagattgagaaatgcaattagtgcaaagcacagagtagtagaagtgcctgcctcaaatttgaaaaaggaaatcactaagatccttttcgacaaaggctacattctgaactacaagtttgtagaagatggtcctcaaggaactatcaaagtggctttgaagtacgactcagtaaacaaagtaaatgctattaagaagcttattagagtttctactccgggtttacgtaagtatacgggttacaaagacatgccgagagttattaatggtttaggtattgctataatatctacttccaaaggtgtaatgactaacaaagaagctgctgaactgaaaatcggtggtgaagttctttgttacgtatattaataggaggataagcaatgtcaagaataggaaaattacccattagtattcccactggagtaacagttactctgaaggataatgtagttactgtaaaaggtcctaaaggcgaacttagccaatttgttgatccttctatcaatgttgcaattgaagatggacatgtgatgttgacagaaaacgaaaacgcgatgttggataacgtaaaacaaagacatgcttttcatggcttgtatcgttctttggttaacaacatggttattggtgtttctgaaggttataagaaagaactggaacttgtcggtgtaggttaccgtgcttcaaacaatggtaatattattgatttcgctttgggttatactcataatatctttatgcagttacctcctgaaatcaaggtagaaactaagtcagaaagaaataagaaccctcttattatattggaatcttgtgacaaacaactgctgggtcaggtttgttcaaaaatacgttctttccgtaagccggaaccttataaaggtaaaggtattaagtttgttggcgaagaaattcgtagaaagtctggtaagtcagccggtgctaaataatttacataaaattgtattatcatgacaacaaaattagaaagacgaatcaagatcaaatatagagtacgcaataagatttcaggtactactgaacgtccgcgtatgagtgtgtttagaagtaacaagcagatttacgttcaagttatcgatgacttgtctggtagaactttggctgcagcttcatctttgggaatggaagctatgcctaagaaagaacaggctgctaaagttggtgaactgattgccaagaaggctcaggaagctggtattacgactgtcgtattcgaccgtaatggttacttgtatcatgggagaataaaagaagtagctgacgctgctcgtaacggtggacttaaattttaatcaattatggcagttaataatagagttaagataactaacgatatagagttaaaagacagattggttgctatcaaccgtgttacaaaggtaacaaagggtggtagaacattcagcttctctgcaattgtcgttgttggaaacgaagacggtattattggttggggccttggtaaagcaggtgaagtaacagctgctattgctaaaggtgttgaagcagctaaaaagaacttgactcgtgttcctgtattgaaaggtacagttcctcatgaacagtcggctaaatttggtggtgctgaagtattcatcaagccggcttctaccggtactggtgtggtagcaggtggtgcgatgcgtgctgttttggaaagtgtgggtgttacagacgttttggctaagtcaaaaggttcttctaatccgcacaacttggtaaaagctactattttagctttgggcgagatgagagatgcccgtatggttgctcagaacagaggcgtaagtatggaaaaagtatttagaggataaggaggaattatgtcaactattaagattaaacaagtaaaaagtagaattggtgctcctgctgatcaaaagagagtactcgatgcgctgggacttcgcaagatgaatcgtgtggttgagcacgaagcaactccttctattctgggaatggttgaaaaggtaaaacacctggttgccatcgttaagtaattcattgttaataaaaaaactaattacgatatgaatttaagtaatttaaaacctgcagaaggatctacaaagactagaaaaagaattggccgtggcccgggatctggtttgggtggtacttctacaagaggtcataaaggtgctaaatcaagatcaggttattcaaagaagattggttttgaaggtggacagatgcctcttcaacgtcgtgttccgaagtttggttttaagaatattaaccgtgtagaatataaagctattaaccttgaaactattcagaaattggctgaagctaagaatctgactaaggtaggtatgaatgactttattgaagctggtttcatttcttctaatcaattggtaaaagtactaggtaacggtagtttgactactaagcttgatgtggaagctaatgctttttcaaagagtgcggtagctgcaatcgaagctgttggtggtaatgcagtaaaactctgattcaatgagaaaatctattgaaacattaaagaatatatggaaaattgaggatctgagacaaaggatcctcattactatattatttgttgcaatttacaggtttggttcttacgtggttctgccaggtattaaccctgctatgttaactcagttgcataaacaaacgagtgaaggtttgttagccttgttaaacatgttctctggaggagcgttttccaatgcatctatttttgcattgggaatcatgccatatatctcggcatcaattgtaattcagcttttggcgattgctgttccctactttcagaaaatccagcgtgaaggtgaaagtggtagaagaaaaatcaatcagtatactcgtatattgacaattgcaattttggttttccaagctccctcatacttgcttaaccttaagatgcaagccggaccatcacttaatgcttcattagattggacattctttataattacttctaccatcattttggcagctggaagtatgtttattctgtggcttggagaaagaataacagataaggggataggtaatggtatatcattcatcattttgattggtattattgcccgtctgccacaatctttattccaagagtttgtttctcgtctggcttctccgggtgcaggtggtatcatcatgtttttgttggaaatagtatttttgttgttcgttattgcagcagcaattttgctggttcaaggcgtccgcaaagttcccgtacagtatgcgaaacgtattgtaggaaacaaacaatatggtggtgcaagacaatatattcctttaaaggtgaatgctgcgaatgtaatgcctatcatctttgcccaggcaatcatgtttatccctattacattggtaggtttctcaaatgctgcaacagcaagtggtattgtacgtgcatttgtagatcatactagcttctggtataattttgtttttgcaatattgattattgtgtttacatacttctatactgcaataacaattaatcctaaccagatggcagaagatatgaagagaaataatggttttattccgggaataaaaccaggtaagaatacagctgagtatatagatgcgatcatgtctcgtattactctgccgggttctatattcttggctcttgtagccatcatgcctgcatttgccggtatttttggagtaaaagctgagttcgcccagttcttcggtggtacatccttattgattcttgtaggtgttgtattggatacactccaacaggtagaaagtcatttgctgatgcgccattacgacggattgttaaattccggaagaatcaaggggcgtgctggtaatgttgctgcatattaattagtctgagatgatatttcttaagacagatgatgagatagagctgcttcgtcagagtaacctacttgtaggtaggactctggctgaagttgctaaattgataaaacccggtgtgacaactaaggaacttgacaaggtggctgaagagtttattagagataatggagctgttcctacttttaaaggttttcccaatcagtatggtgatccgtttcccagtaccttgtgtacttcggtaaatgatcaggttgtacacggtattcccaatgatatccctttgaaagaaggtgatattgtttctgttgattgtggtacttatatgaatgggttttgtggggattcagcttataccttctgtgtaggagaagttgatcctgaggtcttgaaacttttgaagacaacaaaagaagctttatatttaggtatagagaatgccattcatggaaagcgtttgggtgatataggttttgctgtccagcaacattgcgaggctaattcctatggtgtggtaagagaattcgtaggtcatggtattggaaaagatatgcatgaagatccgcaggtacccaattatggaaaaagaggatacggcactcagttgaaaaagggtatgtgcattgccatcgaaccgatgataacattgggttcccgccagatagtaatggaaagagatggatggacagtgcgtacacgcgataggaaatgtgccgctcactttgagcatacagttgcaataggagttgggaaggcagatattttgtcctcatttgaatatgtcgaacaagtattaggagataaagcaatttaatatggcaaagcaatccgcaatagaacaagatggagttatagttgaagcattgtctaatgcaatgtttcgtgttgagctagaaaacgggcatgagattactgctcatatctctggcaagatgagaatgcattacattaaaatattacccggggataaggtcagagtagagatgtctccttatgacttatctaaaggaagaatcgtttttagatataaataaaaaagaaataagatatgaaagtaagagcatcattaaagaaacgtacgccggaatgcaaaatcgttagacgaaatggccgtttgtatgttattaacaagaaaaatcctaagtataaacaacgtcaaggataatttattatttttgcaaaaaaaataatttagtatatggctataagaatagttggtgtagatttgcctcagaataagagaggcgagattgcgttaacctatgtatatggtattggacgcagtagttcagcaaaaatcttggataaggctggtgttgacagagatgtgaaagtaaaagactggacagatgaccaggctgctaaaattcgtgaaatcattggtgctgaatacaaagtagaaggtgatcttcgttcagaagtgcaattaaacattaagcgattaatggatattggttgctatcgtggtgtacgtcaccgtattggtctgccggttcgtggccagagcactaagaacaacgctcgtacacgtaagggaagaaagaaaacagttgcaaataagaaaaaagctactaaataataattgttgatatggcaaaaaaaacagtcgcagctaagaagagaaatgtgaaggttgacgctaatggacagttgcatgttcattcttcattcaacaacatcattgtatctctggcaaatagtgaaggtcagattatctcatggtcttctgcaggtaagatgggatttagaggttctaagaagaacactccttatgcagcacagatggctgcacaagattgcgctaaggtagcgtttgatcttggcctgagaaaggtgaaagcttatgtaaagggtcctggaaacggacgtgagtctgctatcagaactgttcacggagctggtatcgaggttactgaaattattgatgtaactccgcttccgcacaacggttgtcgtcctccgaaaagaagaagagtttaatagataacctatttttatatgtaacttgattttgttaataatggattgcacttcctttctgtaatcgcggctgcaacaaattaagttcattagtaacaattaaattagaaaaagaaatggctagatatactggaccaaaatcaagaattgcccgtaaattcggtgaaggaatctttggagcagataaagttttatctaagaagaattatcctcccggacaacatggtaacaacagaagaagaaagacttctgagtatggtgtcatgttggcagaaaaacaaaaagctaaatatacttacggtgtattggaaaaacaattccgtaacctgtttgaaaaggctgcaagtgctaacggtattaccggtgaaatcttgttgcagagtttagaggctcgtcttgacaacgtggtgttccgtttgggtattgctccgactcgtgctgctgcccgtcagttagtaagtcacaagcacattacagtagatggaaaggtagttaatattccttcattctctgtaaaacccggtcagattgtgggtgtacgcgaaagatctaaatctttggaagtgattgctaattcacttgcaggattcaatcacagcaaatatccttggttggagtgggatgaaagttctaaggtaggtaagttgttacatatacctgaaagagcagacattcctgaaaacattaaagaacacttgatcgttgaattgtactctaaataataattaatttcatggcgatattagcatttcaaaaacctgataaagtattaatgttggaagcggactccagatttggaaaatttgagttccgtccactcgaacccggtttcggtattaccgtaggtaatgctttacgccgtattcttctttcttcattggaaggatttgcaatcaacacgattaagatcgaaggtgtagaacatgagttcgcatctgtacccggtgttaaagaagacgtgaccaacattatcttaaatctgaagcaagtcagatttaagcaagtagtagaagagttcgaaaatgaaaaggtaagcattaccgttgagaattctagtgaatttaaggcaggtgatataagtaagtatttgactggatttgaagtgttaaatcctgaattggttatttgccatttagattcaaaagcaacaatgcagatggacattaccattaataaaggtagagggtatgttccggccgacgaaaaccgcgaatattgtaccgatgttaatgtaattcctatcgattctatttacacaccgatacgtaatgtaaaatatcaggtggaaaacttccgtgttgaacagaagactgactacgaaaagctggtattggaaattactaccgatggttccattcacccgaaggaagctttgaaagaagccgctaaaatattgatttatcatttcatgttgttctctgatgaaaagattactcttgaaacatccgatgtggacggcaatgaagaatttgatgaagaagtattgcacatgcgccagctgcttaagactaagcttgttgatatggacctctcagttcgtgccttgaactgcttgaaagctgccgatgtggaaacattgggtgacttggtacagttcaacaagacagatctgttgaagttcagaaacttcggtaagaaatcgctcacggagcttgatgatttgctcgagggtctgaatctgtcgtttggaaccgatatctctaaatataaattagataaagaataaaaaatgagacataataagaaattcaatcatttaggtcgtactgcttctcatagaagtgctatgttatctaacatggcttgttctttgatcaagcacaaaagaatcactacgactgttgcaaaggctaaagctttgaagaaattcgttgagcctttaattacaaaatctaaagacgacacaactaattcacgtcgtgttgtatttagcaacttgcaagataagtttgctgtaacggagttgttcaaagaaatctctgtaaaagtagcagatcgtccgggtggttatactcgtatcatcaaaacaggtcatcgtttgggtgataatgctgaaatgtgctttatcgaattggtagattacgatgaaaacatggctaagactgcaactgctaagaaagcaactcgtactcgtcgttctaagaagagtgcagccgctacagaagctcctgcagcaccggcagctgaaactacagaggaagcccctaaagctgaataatctgtaatcatcatatatataaaagccatagctataaaagctgtggctttttttattttatgccctgaccggcagtaatgagaaaacaagctgtgaggcttctgtccacatgcatattacttgttctgtttacaaaagttttgatacggacgaggcatgcagaacaagaacagcttttaatttaaagtcggaattagaaacatcgaataattccttcaaaaccgtcatagataggtaacctgttgcttttcaggaagaaaccatgaaggaattgagaaccgatccttcataattttggataatccttcatagctcccttaaaacaaaatacctttgatatgtgttaattattgtatgaaatgaaacctaaaacgctatttatgttatctttgtaaaccaaacagtaagcaatgaaaggatttgttacagtcatattattttttctgtttgccttggcttttgccggaacagaatatgtagatgcagttccagctgcatcaatgacggtatgtactgtacagcatacggatactactccgcagcactccatcaatgaagatcgtgtcattcccttggatagcaataagggaatagcagatatggagtttggggacgctcatactttagcacatcgcgtcagtgcctctgcagagcgtatgtaccgtttttcctccatggagactacccaatttatcaaaattttgttgcgtaagatggccgcccggatggccagtcttgcaagctgtcatacccatgtgtatgcctcttcctattcccttccctgggatagtgcttgcgagcactatatctttggtatgaggcgcattcttatttagcttttattcttttaccaatttgtttttcatggttctgtcttgccgggtgattggcgagatgtgaccttggtatgaattattgtatttttaattagtaaagaataaaatttaaattattatgagtaatacagtttctactgaagcaaccttgttttcaacaacacaccctgatgtcgtaaaacgtactagtgtttcttctattatcatatccgctatcctttgtgtgataggtgcgggtgcatttgcaacctctttaaagatgggggattcctcatccaccatgagcatggtgcttatggccggtggaaccattttgtttctgtgggccgtattccgctttttctggcgaggcaaggaatgggtatatgcacctaccggcagcgtagctaaagaagggacctgcttctttgatgtatgcgatttacaggctttgacggatgcgttggagaaaaaaggttttgaaaccaggaatgacgtgaaagtaaagacaaacggaaacgtacgtatggactatatgatttctcaggacaagaaattcgttgcggcccagctgttccgtttcatcccctatacatacgaacctgcatcttctgtgttttatttcacgggagatgatgcaagtgcgtttgtacattgcttggaaacaagtgaattttgattttctatgactctttatgttatgaaataaggtgtgcctgtgaaggtctgctttatttgcttaagacgttaatgtgataaattgtcgggtggggttagtcgttgatgattagccccatctttttcatcaggaagcaggcattcatattttgtgcgatgccttcacggagtttgtatgaaaaagtcagttcatcgttggtaatatcagcttcaaagcaataattccgtatctctttggggaaatattctattagtttccctaatagcaggtcgtgtgtggcaatgatgccattcgtcttcagttccatcagttggcgtaccagggcgaatgagcctttctgcttgtccatcgagttggttccttttaaaatctcatccagaatgatgaacaactcctctcccttattcaggcggtctataatttgtttcaatcgttttagttcggcaaagaagtaagattcgttgtctgtcaacgaatcggaagtccgcaagcttgtcactagtttggcaggatatatttcaagggaggaacagcatacggggcagccggtacatgccaatacataattcactccaattgtacgcagataagtactttttcctgccatgttggcccctgtgatgatgacaaagaacggtcttgaggggatatcggcatcattggtcacacattgccgtgcaggcatcaggggatgtcccatatcctttgcaaggaatacaaaaggcttgccggcaatggtcggataggtgtatgcgggatggttgccggcaaatgtcgccagagaacaaagagcatcaatgtcacccaatacgtccagccagtggagcagatattttccatatttgtgcctccattgctcaatgcgcattacctgccggagttgccagaacatggaaccttccagcaagacatatagcagttggttgttgcgcaagtccagtttgtccagttcccgtgaaagctctttcaagatatgggtggtggatttcccgtccatgccgaattcagctttcaggtgtctgagtagcggagcgttcatttcccggttttctatcaggctgatcagttcggcgtagatagacaggatacgtaatttcttgtcatacactctttgcaggttgctgacaggctttatcagtccgaaactacctatcacgaacagtccgaaggccagtccgaaccatgtcatcggaatgacccccgccactcccagcatagccagtacgatgttgactccgggaacgattcccaataacgggcggctccaccatttcttgctgaaataggcaggtgcttccgtccactctttaatttcttcgcggtcgcttgtcgcccctttgtagagcaggccggtgatccggaatgtttcccggaaatcggaataagcagccagttcctttgtcgcctcctgccgttggattatctcttcctttatctccagatgattttgcaaccattctgccagtttttcctttccgaatgaagtgcaggtacggttcaaggcctggaacaaggagtgccttccgaacaagtccaggtcaaaagaatacctgtgggccgggtttgtgaattcctttccgtcctcaaaaggctcatagttgtccgccagtgcggaaagctcgtcactattcacccgtatgcaggtttccagccagtctttgcggaaaaacaaccggttgtgatacttcaccaatgccagaaaaggaacgaaagtgaccgctatggtgagacatatagtgggtgtccctgcctgatagaagtagattgttcctataatccctgctgcaaataacaagaccctcagcgtgctgatgcggagaatcttattttttacctggcggagttctgcctcagcctgttcaatgcgctgttcgtattttgctttcaattccataatgataggttataaatatttccttgccataccgggcgcggttttgcagcggagagggggaagccttctgcggcgatgcaagggtatggcgaagaacttttcatttgttttccggcaaatatatagaaaaaaaaacgtctccttctgtttcttgtgttatttagacttatcttttcattttaggaagaagagccttccatccggaatgatggcggttagaccgatgaggatgcatgacaggaaatgaaattttaacatagccgatgaacccattgtcaataggaaaaagtatatttgtctgtctgataaagattataaactacttggggtatgagaaaaatgatattcattttatgcattccgaccgctttgctttcggcttgctcaccatccggaatgcaaggcaatccggcggcagtacaagccggtgcggccatcggcggagtattaggcgctattgtgggtgacagggccggcggatacaacggttcgcaattcggcgccctgctgggaactgtaacgggggctgctgtgggaaatgccataactacacctcgggaggaaacttgtcaggtggaggagtattacgtaaagacttatccttcttcttcgcagtatgagcacacttcctcttatgagccttcatcgggattgaggattatcaacctgcgttttatcgatgataaccgtaaccatgttattgatgcggaagaagacagcaaactggtgttcgatgtggtgaatgatggtgatgtgcccgcttacaatgttactccggtaatagaggaaatgagcggcatgaaacatattttgatttcaccttcggctcagattgcctatatgcctgtcgggaatcagataaggtacacggccaccattcgtggaggcaggaagttgaaaacaggccaggcgcaattccgtgtttttgcaacagagagcaacggggcggtgaccgaagcgcatgagtttactttgcctacccaaaaacggataaagaaataagttccttcattggcggggcttctgcgggcggataacccttttccggagataacgtaagcattcgcagccctattgttaagcctttccgaccgtccggttactatctccaaagcctgcggagttatctccatagcctttggagttaactccgcaagctttggagataactccatagtgctatggagatagtatatatcctttcttcagaccttagcaggcgggaggaaaggccttagggtgggggatgtgtggagttactccttgttgatgatgccttgtatctcttgcagggtcagatttcctgtgatggcgatgatggtaaattcatttttttcctgactcatcaatacaaattccttttctttgtttttgttccgtttcagataaatgatggtcttttcgccttcatcgtttatgcgcatcagttcctcgtagccgttcttgggactgatgaaagctgtctcttttttcagcttggcgataatgtcgggtttttcacaacttagaatctggatgttatccagtttggaggctacttcgcctatatttaccccttccgttttcatgtcgggcatcaggctgagcatggcttttgagatatagacagaggttaccccgtccatatcagcgaacttgtcgaaaaaactgtcctgtgcgtaggtgaacagtgagcacagagagagcaataaggtaatgatatatgtacgtttcattgttttatgttatttaatcggtttaattgttcgtttacgttctcttgaatttttccggtggcttcctgcaccgattccactttttctattcctttattcaggctgctggaaagcatgataagtgccttctgggcctgtacgtatgcttcttcgggggtggcgcaggtatcttgcggtgccggatagggcttgtataggtacagtcctacggagagcaggatgagcaggctggcggctatgctccctatccattgcaagcggaggacccgtgtatgtttttttattttcagcgtgcgtctttcgcctgtgtcccattggtctatcttgcggctcagcctgctttccagtccttccggtatttcgggagcgggctgtgctgccagttgcatgaagatttccttctcggcaagtaaatgagccggaacgtcctcttcggtaaaaaagcgtttcagttccttttcttcggtttcgctggtttctccatcgtaataccgggtcaatagtctttctatttcatttactttcatagttcattattgcattatattgttcacgtatctttttgcgggcgcggctcagcaacacacgtatgttgatggcattcagtcctgtggcttgctctatctcctcaaaggagcagtcattgacatcacggagcagaatcacccgcttttgttgctctggcagtctgccgatgagccggcgtacctggttcacctcatcccgttgttccacttcccgcgctatgttggtgtccgtagggaggttcagctcttcgggtgcatgtccgtcttcatcgggccggctcctgcggagggcgtcgtagcacaggttcttgacaagggtgacgcagtaggcttcggtgttcagcacgcccgccagctcatcgcgcttgttccacaatttcagatacgcctcctgcaccatatcttccgcctcctgagggttttctgtcagccggaaggctgtccggtagagtttgcggtggtaaggcaggaattgttgtttaaactcagcggcgtccatgcttcttctttgtttcctgatttactaatttgtctatatcttcctttgtgaattttccgtttatctgtaccagtgtacaatcctcttttcccgtgcatacgaatagcagttcgcggatagtttcctttttggttttcatcagcacgcggactttctcgccttcatcgtttacacgcatcagctcatcgtatcccttcaggctcagcctgttcacttttttgttgaaccgttcttttacgcttgccgtacaagattccaggtccagtacttttattgactttatttttcttattatctcagcgtcttcatcgtgtccggcgaacatttttccaagagacatcatgaaagaagatactttgacacaatcggcatttttttcgctgccgaattcattgaaaagaccgttgatgctttgggcgtagcccagatggcagacgaagactagcaatagagtaaatacaaactttttcatggttctattttgtttttgttcatactgaaattgttttttgaaagcgctttcaatcagatagacgggggaagtgggaaagttgttacaaagggaaaagaatttttttaagtttctatgtttgtaaagaggttcagctttacaaagaaagcatcattcaatagcctgtttgatctttcatcagcatgatcacaggctttgccggtccctttaaccaattcctttcattcaggtaatttcggggagtagaatgaagaaaccctcgccttgtttacaaatctttcgcaagttcaggatgagaacaagaggctttcttatgaaatgatatgggttggaggattattggttccgcacgggcagcctcacccatagccatccgggaatcagtttccagaaaaacaccagcatctgataacgccggtctatgacagctactcttttccttcgggagatggctcttacaatttgtgatgccacgtagggagcatgcatcagcagcgggtatttgtcatctttcaacagaggggtggcgacaaatccgggacggatgtcggtgaaggaaatgtgtagcttgttcatgtgcgccaattggtccaaagcatccagataggtgttttgaaaccgtttggtcgctgaataggcaggggcggatcccagtcccttggtgcctgctatggaactgatcaccgctatatgtcctttgccttgctgttcgaaatagtgataggcggcattgaccatccgtatgaatcccgaaacattggtggctgcggtctgtaattcgatatcggggcagagtgaaagattttgtttgcctatgcccgagctgagcaagaacacatccatacctcccattttagtaatcagttgctccaatgagaaaggggcgtcctcacgggtgacatctattgtctgagtacatacctgtccgggcgcggataaccggattttttccagttcttcttctctacgtcctgccacgcctacttgccagccgtctttcagatagcatcgcgccacttccagtccgatgccggaagtggcgccaatgataatgatttttttcatccgcttcgtcttattgtaaagcttgctcaatgtcggctatgatgtcgtttacattctcgatgcccactgaaagacgaatcaagtccggagctactcccgcttcgcgcaactgttcgtcggtgagctggcggtgagtatggctggcgggatgcagtacgcaggtccgtgcgtcggccacatgggttacgatgcagatgaatttcagcctgtccataaattctatcgcttcctcacgggttccgttcaagccgaaagcgatgacaccgcacgagccgtttggcatatatttctgtgccagatcatagtatttgctgcttttcagtccgcaatagttcacccatttcactttcgggttggcttccagccattcggccactttctgtgcgttttcgcaatgacggggcacgcgcaggtgtaatgtttccaatcccagattcagcaggaacgcattttgcggagactggatggagccgaggtcacgcatcagttgggcggttgctttcgtcatgtaagccattttgccgaacgctttggtataagtcagtccgtgataagactcgtcgggctgggtcagaccggggaatttgtccgcatgggcttcccagtcaaagttgccgctgtccacaatggcgcctcctacactggtggcatgaccgtccatgtatttggttgtagaatgggtgacgatatccgctccccattcaaacgggcggcagttgatgggagtggcgaaggtgttgtccacaatcaaaggcacaccgtgcttgtgtgcgatgcgtgcgaacttttcgatgtccagcacatcgatgctcggattggagatggtttcgccgaacaacgctttggtattcgggcggaaagcttggtctatttcctcttcggatgcattggcgtcaatgaaggtacactcgatgcccagttttttcagcgtgacgccaaacagattgaatgtacctccgtagatggtagacgagcatacgaagtggtcgcctgcctgacagatattgaaaatggcatagaagttggcagcctggccggacgaggtcagcatagcacccacaccaccttccaatgctgcgatttttgcggcgacggcgtcattggtggggttttgcaagcgtgtatagaaatatcccgaatcttccagatcgaacagacgcgccatctgttcgctggtgtcatacttgaatgtggtactttgataaataggcaaaacgcgcggttcgccttttttcggagtccagcctgcctgtacgcataaggtctccctgctatacttcttatccatgtttatattgttattaaaattacatattcatttatttcgcagcaaaattaagaataatctgtcatttagggttcaattattgagaaaagtgttatatttgaacgattttaataagcttaactatggcagaggatataaaattcaggcatactatgccggtgcagatacgattcagcgatgtggaccagtttggtcatatgaacaattcagtttacttttctttgtacgatttggcaaagactacttatataaaagatgtattaggcagtgccgactggagcaagctggctattgtggtagccaatatcaatgcaaacttctttatgccggtatttttctcggatcatctggtgatagaaacggctgtggtacatttggggcataagagttttaccttgttgcagcgtgccgtgactacggatacccatgaggtgaagtgtgagtgccgcacggtgatggtaggttatgacctggctaccaaagaaccgaaattgatttccgaggattataaggaggcgatttgcaggtacgaggaaaaaacattggaggaactttcaaaagggtagccatagatgatatactcgctataaatagctaggacgttatttatagcgagattgtattattttattaaaagcattctcctgtaatggttaaaagtttgggagatgagtcaaaattaccatataataaaatttctctttgaaactttcctatgtcatcgggatggaaaatgatattcagacaagtgctgtctcccggatttatttcagtaatttcattttcaatattcaaacattcgcatgaaagatctatatgactgattcttactatgttcttccctgtattccatattgtgaatttgatttttgccttttccgtgcggctgattttgcctaaatctatctcatttgtgttgaatgtaatggtggtgttcgcttcttcgctgggagattcatttccataaaaagagtgcgacacatatttaccattatttaaaaggtagactctaggtgtgtttttagccatatccaattccactaatatggatttagtgtctaggtatacattggagtagtcatctatatttttattggcaattaaattgaaagtctttttacttttacatgcaattatataaatagtatcggtcgagttatgtatttctgacagagctttgtgtatgcatcctttgcaaccattacccaatatggtaacaaggtgggtggcattgtggatttgtgatttctcaactccgacttcatcaaacagtttttgaaggcatttgtcattattggacatacagcttgccaggaacagtcctccacatagaatgattgagtagttctttttcttcattttttccggccttgaagtgtgaaacacctgaacactagcttgttttcatcaaactgagggttgttttcattattctctgaaatatacaggccttttttacctacgaagcacaagtgatgggcataggtgttgccgggaaattttgtttcaccaataatttcatagtctttgtttagaatgatgatggagaaactttgatgcggattgttggagaatggttttatattatcatccggcattaaggcaaaccgatagaatacttttcggtatttatcatacatcaagtggtggtaatggggctgtaatcctctgtcatgtatggttttgaataaatcaatttgtaaattttgggagactggacgcacgtggggcagataatggcttttagcattatacgcttttttatgtttgaaatcagaagatacaaatatgctgtcatattgtcccagtgaaacaacaacttctttacctgtatatgtgtaactgatttcagggtcatacagaatgtagtctatctcatctttgttaaaaatagatgggtatcgtagttctgtccaccctagtttttttttatgaaggtctgcataagcaaatatgggtattttatcccattcatcttttttacggggatattttaataatgattgactgaaatataaaatagaatccttaattatggcaggtcgatatgtataactcatgcaacaaatgtggtcgaaagcatgaaagtttacgctgtctttccaaaagctattcttattttccacttctcctttttcattgataattccaaaaactccattccaagttgtaattaaaaaatgctttgagctaagtggaaaacagccattagttgatggcattgcatttctcccctctttttgtagatgaattgttttaataacttgtttggtatccaaatcatagatatgaactttatagcttgctttttcattcaaaaaggaaagatactcatgtccgttttcttcaaattggaatatagatttgctttcataatgtgtatgttcatctatagacaggcagatggagtctgtagctgttaattctgtaccatagtctattggacgagaaggagatgaacatgatgctcctagaagcagataagtgaagatatacaaaaaatatttcatacactatagattaaatatagggtatttaattatcttcagtttgtagattggatcaactaattatgaataggaaagatcttaaatatcctatggaatgatttgctagtcggttaaattaattgggagctccttcatctcttccgcacctttggtttgggtcttcataacaattattgaatgaaaaatttacacaagaagacgctccatcgaaataccagcatttatctccttcaccgggaggtccgtaatcactgcgagcatttccgttttctgtgttgctcggaagaggtgcatcaaactttaattcttgtcgggaagaatagatctctacgctagtcaaacaaagaatgactaggactaaaaaaagtgatttgtttttcataagatctgcttttaaaggttagtatatagttaacttcacaaatgtacattagaattttattatatcaaatatattttggaatatttttcagaatatattgttgggtaactggtttatatgcagtgatataattgaatgtgacttatatgatgtgctaaatttatgctttttattatgaagaaaataaacctgtttagttctaaaactattaataaagttctttatgtaccaactcttcaaacagcaatgcatattttgcaacgactgcttcggcgtatttcttcccttttccggcacttgcttttttgggattgcctataccggtgtcttgcgaaactttttgccagttcctcggaatccatgccactttttcattcaacatttgtgaggtgaacttcttataatctccgtttccggcttcgtctaaatttaccaattccggatgataatgcatcataacagaagtttccaattcatctgcatggtcacccggttcatcaaagtactctttagcagggacaaaggcaaaccattcgctgctggctatcaggaagtcgggatagtccagtgacaagtcacgtatcatacttttgaatgtattgccgccatgtccgttgataatgaccattttgcggtatccctgggcgtatagagaggcaactaggtcgtttaaaatcgctttttgcgtttcatagcgataatggatgcagaaatccagctcgcgttgtcccggattctgtgaaccggcaatgacgtaaggcatgaccatgcaacgaataccgtaatgtgtttttgccagttttgcagcatctagtgcgatgtcgtggctcagaatacagtctgtcagataaggcaggtgcagattatgcggttcggtagccccccaagggaggaggaccaaatcatatttcaatggttttaccttgccgtaacaggttacggcaaggtctagttctttatccattatttataagaatttttaaagatatgcaggatttcttcgtctgtaatcgggcgtgggtcgagagtgaacagtcctcccatcgtatctcttgcattttgcaggaatttggggaaatcttcggattggataccaaattcgctcagtttgatagaatgtactttacattctttttgcagtgtaatcaatgcatcaatgaaatcggacggacggttgctctttttctgggtcatcatttcagccattttcatgtaacgttttgtacagtcatgccggaaagtttcgaagtatgcctcagacaaggcaatgagtcctgctccatgaggaagttgtggataataagcactcatggcatgttctaatgaatgttcggaagtgcagcttgaagtggcttctaccatgcctgccaaggtgctggcccaagcaattttggcacgcgctttcaaattctttccgtcggctacggctactggcagatatttgtagatcagacggatggcttctaaggcgtaaagatcactgatgggtgttgcacaattggcgataaaaccctctgcggcatggaagaatgcatcgaacccttgataggcggtgaggtgcggaggaatggaaaccatcagttccgggtctacaatagataaggtagggaaagtcagctgacaaccgaagcctatcttttcttgagccgtttcgtgggtaatcactgtccatggatccatttctgttccggttccggcggtagtagggatggcgataatgggaagtgctttggtaacaggacgtcctttgccactaccccctgatacataatcccagtagtcaccgtcgttgcaggccataacagctatacttttggctgagtcgatggaacttccgcctcccagtcctactacaaagtcgcacttttcctcccggcagatggcggctgcttccatgacgtgttctttgatggggttgggaaggattttatcgtaaaccagtgtttctacattattcagtcttaattgggcaagtactctctccaagtatccatatttccgcatggaagttccggatgagatgacgaccagtgccttttttcccggtaatttttcactggataatttcttgatttctccgcaaccaaatactaatttggtagggatgtataaactaaatacaggatttgctttcatgttctttcgtatttaaagtttcactggtaacaaatgtaggaaaataatagtttgcttgtttaagtaatttgttaaattttacatactgccggattgtattcgttttctttaattcagtttgagatagatacgttttttcgattatactcgaaaaaagaaataaacagtgcttttttttcgattatactcgaaaaaaactatctttgtgggaaaagattcgagtatggacgataaatggaacgctttagaaaagtataacctttggggtggaaatacgtatcaattgggactggaacggaaatcttataccgacaagattggcaattttgtggggtcgttatgtagaatttcatatattcccctatagttatgctgaatatttacagttgatgcagcaacctgccggtcgggcttcttatttggcctatttacagaaaggcggtttgcccgaattgtacaacctgcccactgtcgagtcagaaaaacagtatgtcgcttctgtgaaagatacgattttgttgcgtgatatagtgaagcgtaaacccgttcgtgatgtaaggttattggatgatatttttatttatttggtgaataatgcgtccaatctgttttccgttcagcatattgttaatttctttaaatccaagaaccggaaggtgagttatgataccttatctaattatctaggttatatagaagaagcttttcttgcttataaaacagaacgttacaatataaaaggaaaggatgtggtggcaggtaattgcaagtattatctgaatgacttgtcctttaagaattttctttatccgggctttgcttatggagtcgggtatttgttggagaatgcagtatatttggaacttcgtcgtttaggctatattgtatatacaggttcttttcgggataaagaagttgattttgttgctatgaaggacgatagagtgatttatctccaagcaacttacatgttggaaacggcacaaaccatggaacgggaatatgctcctttgctgacgataggtgataattatgaaaaatatgtcgtttccatggatgaggtacaattcccttccaatgaaggggtcaggcatatacaggcttggaatttaaaggaaatattgtaggaaatcagtttctctttttaacatacagtttttggtaagagttgtcaaaactctgatgatattgtttgtagtctattatccaatgttgctcaccgctcccccggatatgtagagcaggaatagcaccgaagaggagagtatagtggatattatttgcttatgtgcagttggcgcaaacatacgattggcatatcagtctgtatatcagtattccgcttatctttgcagtcgctatcgggctgagtctgctttcttattactattttgagaaaccggccaaccgctgggtaaaacgaattttaaataaacaataataactagttcatggaaaaacaattatcagaaaaactgccacgcgttgaggtggtggatgctttacggggatttgcagtcatggcaattcttttagtgcatagtttggagcatttcatctttccggtttatccggtagaccagcctgcatggttgaatatactgaatgacggggtattcaatgttacatttactttattggctggaaaatcgtatgccatttttgctttgctgtttggatttacattttatattcagtcggctaaccaacagcgtaaaggaaaagattttggttatcgttttctgtggcgtttgctgttattggtagcttttgctacgctgaatgcagctttttttccggcaggagatgtgttgttgctgttctcggtagtgggaatcgtattgttcgtggtgcgcaagtggagtgactgtgccatacttgttacggctattttgtttttattgcagcccgttgagtggtatcattatatagtaggtctgtttgatccttctcatactttgcccgattggggagtggggcgatgtataaagaagtggcggaatataccaaagaggggaatttgtgggagtttttgggtaagaatatgacctttggtcagaaagccagtctatattgggctctgggagcagggcgtttttggcagactgccggcttgttcttgatggggttgtatatcggacgcaaacaattatttgtaacttccgaaaaacatactcgtttttgggtgaaggctcttatcatttccgctatctcttttgctccgcttttccaactgaaagagttgattatggctagtgacagtgaactcattcgccagactgccggaactgcttttgatatgtggcaaaagttcgcttttacatttgtactggttgcttcttttgtattgctttatcaacgggataggttcaagaattttgtatcaaatcttcgttattatggtaggatgagtctaactaattatatcacccaatctattgccggagctattatttatttccctttcggactttatctggctccgtactgtggatatacgttgagtttgctggttggttttgtactctttttgttgcaagtacagttctgcaaatggtggttgaaaggacataagcagggaccgttagagagtctttggcataaatggacctggatgtattccaaaaaataaggaactctgggcaggagttgcatatgctatacggaagagaggaaaaggcgaaaagtaatttgtcttttcctctcttccgtatagggactgattcttgttttccaagtttcccgaatatcataaaaaggatatcagttcaggattataatcaattgtttttgccttctatctgaatttgaattgcttgtcctgtacgttgcagacattctataaaaatagaaagatgattggtcttttgcatcaactcacatataatttccttttcttctgtgcaccaaggttcataagcacgtgggaaagtttcacgttgtttatggatataaggtggaaggactgttttctgaatgcctaactcttggactttttgttttatacggcaaatatcttcttctgtacaatcattaaaagattcttttgtaaagaaccccggatatttttggtcaatgtcaagattgattgtaggcttagatagggattgaaaggttttttctctgctttctagttcctttatcagattgttgatgtactcatcggcttgaacagatgatacaactatggaacattcgtggcgggagtattctttatggcggttggcggataaccagttgaaagaaccctctataagtgtatggttatcaatggccaatgatttattgtggataccttttacttcaatgagggttgcgccattttctattaatatgttccgtccctcttcggcacggctgagcaactgattggttttcgtatcataatctagagacgaatcggtgtagactgtgacatccactcctcgttgtaccgtgtggcgtatcagcggaaccaactggtcgttttctatggcgtggatagatatgaatggagatacaatcagcagacggtgtcttgctttttcaaaagcttggtgcagaacctggatatgctcttctgtggtggacagacgaagggtggggtggtaggtgcacagcggaacttcctgttggtaaataaagttgttggaaatctcgttggatggatcatcgaaaagccatttagccatatttcctaccggggtgttttcttccggatggaaaatattcatgttgccaaaaacaatgaaatgatgctgagcgcgcgatatcgctacattgagcatattgtattttccatcacgctccataaaaagagaatggtcttcgggagagttgactgttgaaaaaagaacaatcggacattgggcaccttgcagggaatgtactgtgccgatgatcatatctttatatttctcatttcctgatattttttgtatttgatgccgtatttcggcttcttgggctttaaaaggagttactacggctacaatttcatgaataggctttttataggtcttttccagattatctttttccagttccagccaacagacaatggcttccgcttcagcccggttgaggcgacttcctgtttttccagggctgctgtaactgttgatgtgtacatatcctttggaagggagggacttgtattttacttcgttaccttttttaggaagtaacctgccgtggtaaacataatcattgcaataggcaataatggaatctacgcatcgtctgtgttcggtcagaaaagctcctttttcaccttttactgtaaaattacagcttttacgtgccagtttcattatacttccggaagaagaaaggaaaccattgttttctaaaaaacggtatttttccgaggactggttggaaacaatgcccagattctttaaattaatgaatgaatattcatcagaaatggaccatacaggctctatttgttgaatatcacctactaaaatcgcttgcttggccaaactgaaggagggaacggcaagttcgggtgaaacttgtccggattcatctacaatcaacagatctattccattgtataaaggaatatcccattttccgttctccgcataggtcatatacttgggtagagaatggaaagtagagatgaaaacaggcattacgcaagccaaacgttttaatctttgggtataggcttcttgtgtgcgctgcttgccttcatcgcacttgcttaaccggtgaataaactcggcttcccgataatgtatggcataccagaacatttgataccgatagctgatatccagccttactgccatgtcttctgtataaggcaagttgccatactcagggttggaacttattttttcgtaacgttctttgaattcttctgtcaaagtccactgttctattactttgtcataggagggtaatggctcatggaatttgcggataaacttctgtaatatattgttttccttccggtttccgtattctgttgtttcggcagcttggatacagagaataatctttttttggagggcttgcatttctttacggagaaattgccggcattttgtttcgtcttgatagtttttcttgaaaaagttattgaagcattgcagatagaattgtttgtactcttcttgacgttcaggtgtatcgtatgctgccggaaatccatcccctttggggttgaacatcattttgtactgttgttgcagctcttttttccctgacagatataggcctaatgtatccagttcgggtagccagcggttggacaaccggggatgtgttgtgtcattggttgtttccgctttgaaatcctttaggatattggtgatcgcctgattattagctgaacttgcaactataatttccggctcttccggattgtttagaatgttatgagcaagtctgtttgcgatgacagtttgcagaaaagtggtttttcctgttcccggaggaccgttgacgacaaaaatatcagcacattccggtgttgtgtacattgctagtgtttcgcgttgagatatggacaaaggaaagtcgctgctcatttgtgcccagtgttcttggttgcaatatactttccggttagttggaataggaagagcgttagcagattttgtttgtattaataaattcaacaggggatgtggagtggtattgtcatcttttaagagtttgtcatatagtgtgattatgggctgtgccatattgcgctcggaggcttttatgataatgatttctggattatcatagtaattcattgtgctgaaagttttgccggttgctttcttgaaaagctgctcgcatgcttgccaataggcctcccattttgtttcttcagtgttaaaattggatagtagttgatctacttttgaaagagaagctatagtgcggtcattggctgcattaggctccaaaaatttacgaataaatattgggattctgtctgattcgttctcgcatacggttagtttgccgtcaggcaacatggtggcagtaatcaagaagggatattccggtctttctgattgggaagtccagccgttttcaaattcgggcaaaagaatacaaggagcaatcattactttttgtttttcattgctgtcttctgctttccaatcagggaaaataacaggaatacttttgagaggaatgaatttaagtatcttgtcatcaatgtttagggtgattcgtggtcctttgagagcaatagctttgcgctctgcatcttgaagacaagttttccagtattttagtaaggtctggtccatttgtttttacgtttgtgtgatggaataatttacaaatataagaaaataggtgaaaagaatacggtaattggagtaacattcctgaatttatgatttttttacattaagagggattggagatgtcgggataatcattattagcggtaaatgaattgggatgaacggaataatggtaatatttagtggtgatgaggcaagaaacttgcctttatgaagcaaatgaagctaaaatagacgagaatttatctgtgtggggagtgtggatatactaattttgccaataaatgaaacttaaatctatgatgaaaagatttgcaaatttattggctgtttttattctttctgtaaattgtattagtgcccaaaatctaactcgttgggttaatccgtttattggaaccggtgctgttcaatccagtctttctgggaataattatccaggagctactgtcccttttggtatggtgcagctgagtcccgatactcgtgaagcgcctgattgggcacaagcttcgggatatgattataatgattctattatttatggtttcagtcatacacgtttaagcggaaccggtgcttccgattttatagatatccttctatttcctaccatgagtgataaaaggaaatcgtcttttactcatcaaaacgaacaggcgcgtccggggtattatcaagtattattaacggatgagaagattcaagcggagttgacggcttctgtgcatgtaggggtacatcgctatatctattctgatggcggtcagttgaaattatggttggatttagatcattcggcaaataaggagagttggaaccgccggataattcaatcacaaatccgtgtagtttctcctacagtagtagaaggatatcgtgttattacaggatgggcaaaactgaggaaaatatatttccatcttgaattttcccaaccaatcttatccagtcagttacatgatggcaatcggaggaatgagaatactcctgtcattaatggtacagaactgtgtggattattctgtttcgacaagaagtggaataatgaattgatatgtaaagtcgctttatcttcagtttccattgaaaatgcccggttgaatatggcagctgaggttcccggatggaactttgaacatattgcttttgctgccgaagccagctaggagaaagaattgaagaaagtcatcatccaaggtaccggtttgcagaaaaagattttttatacagctttatatcacactatggtacaacctaatacgatgagcgatgtaaatggtgaatatatggctgccgattatacgacacgtaaggtagccgataatgaagttcattattccactttttctttatgggatacattcagagcagctcatccgctttatactttgctgcataccgaccgcattcctgattttattaaaagcatgatgaggctgactattatggttatttgcctgtatggcaattatgggggcaggataattattgtatgattggtaatcactccattcctgtcattgtggatgctgtgctgaaaggtgttgcaggagtggatgcggaaaaggcttatgaagcggttcatagcagttccatcgtatctcatccgaactctccttttgaagtatgggagaaatatggatacatgcctgaggatattcaaacacaatctgtttctattactttagaacaagcttttgatgattggtgtgttgcactgttggcccggaaattagggaaagaggaggattatgggcgttttatgaagcgttctgctttttacaggaatttatttaatgcagaaacaaaattctttcaaccgaaaaataagaaaggagaatggatggagcctttcgatccttataagtatggagccaatggcggctaccctttcactgaggggaatgcctggcaatacttctggtatgtaccccagaatatacctgacttgatttcactgacagggggaaacaaagcttttacggcaaagttggatacctttttcacagtcaatcaccaaagtggtgaactgaatgacaatgcttccgattttgtagggcaatatgcgcatggcaatgagccgagccatcatgtggcttatctgtatgcgtgtgcgggagaaccttggaaaacacaaaaatatgtggcacatatcatgaatgaactgtataatgattcctcttcaggttatgccggtaatgatgattgcggggaaatgtctgcctggtatgtgtttggcgcacttggcttttatccggtaaatccggttagcgggaagtatattatcggtactcctatgttggaggaagcggttattcagttgcctgatggaaagacttttaccattaaggccccacgcaaagagcacaatgagatttatatccgctccatgaaactgaatggcaagaaatatgcaaagaattatattactcatcaggatattatgaatggcggaacgttggagtttgtaatgactgcctcaccgggaaaatgataacaaatggtgaagtattggaatttgtgccgggaaagatttctaaatgttgaataactcccttttataggttacgattgaagcaaaagagtctaaaaatggcgagtttttctctacctaatgggagaggtatatctacttttgtttcagaagaaactattaatcatgaaaaatatgaaacattttaagacttatttagcagcaatggctttggccctttccggatgccagagtgcaacagattcctgtggaactacagaattgtggtatgcccaaccggcaaaagtttggatggaatctttacctatcggtaatgggcgtttgggagctatgacttatggtggaatagaggaagagaaactggcattgaatgaatcgacaatgtggtccggccagtacaatgagaaccagaacaaacctttcgggcgagagaaaatgaaccagctcagaaagttgttctttgagggaaaactatcggaaggaaaccgtatagccggagataatcttcatggcaaccagacttctttcggaactcatcttcccattggagatttgaagatgcaattcatttaccccgaaggtaaagtaaccggctaccgccgttcgttaagcttggatgaggctatcagcagcgtttctttcaactccggcggtgtgaactataaacgtgagtattttgctacaaacccggataatgttctcgtactccgcttgaccgctgataagcaaaagtccattactatgaatatgggattggatttgatgcgtcaagccgatctttctgtagaagataaccaattggtatttaccgggaaagtagattttcccttgcatggtccgggcggagtctgttttgaaggaagaatagccgttttggctgataatggagaggtaaagatggaacagtctggagtaggtataaaagaagctgatgccgtgactttgattgttgatgtgcgtaccgattataaaagtcctgattacaagaagctttgtgctgatggcgtgaagaaggctatagctaaatcttatgatgaattgaagcaggcgcatataaaggattataacacgttgtataatcgtgtttctattcatttcgggcaggacgctaaccgcgcgttgcctacggatgttcgttggaaacaagtgaaggaaggcaagactgatactggtttggatgccttgttcttccagtatggccgttacctcaccattgccagttctcgtgaaaactctccattgcccattgccttgcagggtttcttcaatgacaacaaggcgtgcaacatgggctggaccaatgactatcatctggatatcaatacagaacagaattattgggcagccaatgtcggcaatcttgccgaatgtaatgcccccctgtttacctatattaaggatttggcgcatcacggtgcaaagactgccgaagtggtctatggatgtaaaggttggactgcccataccaccgctaatgtttggggatatactcctgcatccagcacgattatttggggactgtttcctatggcaggctcatggattgcttctcatctttggacacaatacgaatttacacaggacaagcaatatctggccgaaactgcctatccgcttttgaaaggtaatgcacagttcattttggatttcttggcaaaagacccgaagagtggttatctgatgacagggccgagcatctcacccgaaaactggttccgtacagtaggcggtgaagaaatggttgcctccatgatgcctgcctgtgaccgtgaactggcctacgagatcttgtcgaattgtgttcaggcttcagaaatattagataccgaccgcgagtttgccgatagcctgcgtaccgctattgtccaacttcctcccatccagttgcgtgccaatggcgctatccgcgagtggtttgaagattccgaagaagcacatcccaaccatcgccacacctctcatctgctggctttgtatcctttctctcagattactttggagaagactcctgaactggcggaagctgcccgcaagaccattgaaaatcgcttgtctgccgagaactgggaagatacagagtggagtcgtgctaatatgatttgtatgtatgcccggttgaaagatgcgcaggaagcgtataagagcgtccaattattacaaggtaagctttcacgtgaaaatttaatgactgtatctccaggtggcattgctggggcggaaggtgatatttattcgtttgatgggaatcctgccggtacagctggtatggcagaaatgctaatacagaatcatgagggttatgtagaattcttaccttgtttgcctattgaatggaaagatggtggttttaaaggtctatgtttaaagggaggagctgaagcgactgctgagtggacgaatgctgtcattaataaagcttctttaaaagctactgctgatcaggttttaaaagtgaaaattcctcaagggaaaaaatatagagtgcttttaaatagtaaggaggcaattgcaaatcctgatgcaaaaggtttgataacggtggatatgaaacgtggagatttgctggaattgttgtaaaaaatagattgctttgcatagcttgattgaggattacatctcagtatattgaggtgtagtccttgttttatgataaagtaacttgcaaaataaaaatagtaatattgtccatgtcccaagtaattttttctatttcttaaacccttgaatctttgttactttgcattataaaaaataactaatagttgataaccatgaaaacacaatctaatttttatctattccttattgctttgatttccgctatgggaggtttcctgtttggatatgactgggtcgtaatcggaggagccaaacctttctatgaacaatatttcggtatagccggtaatcccgtcatgcagggttgggctatgagcagtgccttgattggctgtttgtttggggcgctaagtgccggcaaactgagtgaccgtctggggcgcaaacctattttgattctggcggcaggattatttatttgtacggctgttggtacgggggctgtccattcctttactttatttaatgtatttcgtctgataggaggttttgctatcggtatcgcttccagtttgtcacctatgtatatagcagaaatagctccggcgcatctgcgcggacggtttgtatctatcaatcaattgacggtagtgttaggtatcttgacttctcagattgttaattggcagatagccgagcctgtggcattaggagctactcatgaaatgatccgtgaatcatggaacggacagatgggatggcgctggatgttttgggcaatgactgtcccggccgccttgttctttgtttttagttttatattaccggagagtcctcgttggttagccttttcgggaaagcgggaggctgcactcaaggtgtttacccgtatgggaggaaaggaatatgctgttactgagttggcggccatagaagcggcttcagcctgtcagacgcaagaaggaggttttcgtcaattattgaatcctgctatgtataaagtgctgactataggtgttgtcatggctattttgcagcaatggtgtggtattaatgttattttcaactatgcacaggaaatatttatggcggcaggttatggcgtgtctgatgtcttgatgaatattgtggtgaccggtattacaaatgtcatatttactattctagccatgtttgtggtagaccgttggggacgtaaggcgttgacactgatcggatcatttggactggcagtaatttatgcctttatgggagccgcttattattttcatatcacaggagttgtgctgttgattattgttgtgatggctattgcctgttatgccatgactttggctacagtgatgtgggtcattatctctgagattttcccgaaccgtattcgtggagttgccatgtctgtttgcactttcgctttgtgggcggcctgctttatactgacctatactttcccgatgttgaatagtggtttgggagctgccgggacattctggctgtatgggctgatttgcctgagtgggggaatatttgttgtattccgtttgccggagaccaaaggaaagagtctggaggaaatagaaaaagaattagtgaaataacaatcatttattatggaaaaaataactcaatatttaattcaaagtaccgttcatggcagtgaggtgcgtgcatgggaggaagatattatgcttcctacttatgagataggagaggaagagaagaatcctatttttcttgaaaagagagtttatcagggaagttgtggagctgtttatccttatccggtagtcgagaagatttcagataagaaagcagacaagaaatatcatgcgttgtttatcgagaatgaatacatcaaggtgatggtgcttcccgagttgggaggacgtatacacatggcttatgataaggtgaagaaacgtcactttgtttattacaaccaagttgtgaaaccggcattggtgggactgacaggaccttggatttctggaggaatcgaatttaactggcctcagcatcaccgtccttctacttttttgcctactgatttcttgatagaggaaaatgcggatggcagcaagacaatatggtgcaatgaagtggagagaatgtttcgtactaaaggtatgcagggatttacgctttatccgggcaaggcttatatagaaattaaagtgaagatttataatcgtacgtctttccctcagactttcttgtggtgggccaaccctgcagtggtggtcaatgaccattatcattcggtattcccgcctgatgtgaatgcggtgttcgatcacggcaagcgcgatgtctcttctttccctattgctacaggagtttattataaacaagattattctgctggtgtggatatctctaaatataagaatattccggttcctacatcatatatggctatcaagtctaaatatgattttgtgggtggctatgaagaagatgttcgtgggggacttctgcacgtggccgatcatcatgtttctccgggaaagaaacaatggacatggggaaatggtgatttcggtaaggcttgggatcgtaatctgactgatgaggacggaccttatattgagctgatgaccggtatgtatacggataaccaaccggactttacttggttacagccctatgaggaaaaatcatgggtacagtattttatgccttatagtgaagtgggttatgtaaagaatgcaaccaaagatgctttgttgaatttggaaataaaggaaggtaaagcccgtttggtgctttatactacgggagcgaatagtggagtacgtattatagtaaaagctattaaaggcactgtattattggataagactacacaaatttcgccatcagaaccgtttattacgacttttgcggcagaaggactaaaagaagaggaggtatgtgcagaggttcgtgataaggaaggacaaattttgctttcttatcaggcggataaaccggaaatcaggccggttcctgatcctgctaaggctgctaaagatcctcagaatattgcttctgttgaacaactgtttttgaccggactacacttggaacaatatcgccatgctacttataatccgatggattattatatggaagcattaaggcgtgaaccgggagatgtacgttgtaacaatgcggtggggttattgttgatgcgtaaaggacaatttgcaatggcagaaagctatttccggaaagcggtggaaaccttgactgaacgtaatccgaatccttatgacggtgaaccttattataatttgggctggagttgtatgatgcaacagaagtgggatgaggcttatgatgctttctttaagtcggcatggaatgctgcttggcaggatgcggcttattatgcactagcacaacttgacactcgtaaaggaaagtatgaaagtgctttggacaagatagaccgttcattgattcgtaattggcataatcacaaagcgcgtcagttgaaaacttccattctacgcaaattgggtcgtaaagaggaagctttggcgctcgtagctgaatcattgcagatagatcgttttaatatgggatgccgttttgaacattatttgttgacccgggatgtgaaagtgttggaggaaatgaaagagttgatgcgtggttgggcgcacggatatatagaatacgcattggattttgctgctgccggattgtatgaggaagctttatctttactggaatgccatgtaaccggaactacagaaatatatcctgtcgtttattatgcaatgggatatttccatacctgtaagggagatgagagtaaagcattggaatattatcagcgggcagaaaaagagaatcattcatattgtttcccgaatcgtatagaagaagtattgattcttcaagatgccttacgtctgaatattcatggggcaaaagcggcatatagtttaggtaatttctggtatgctaaccgtcagtatgacaatgccattgcctgttgggaacattctgcggccataaatccggcatatcccaccgtatggcgtaatttgtcgttggcttattataataaacgcgatgacaagcagaaagccttggaaactttggaaaaagcttatgcattggatgagcacgattctcgtatcttaatggagttggatcaactttataaacgtttagggcggccgcatagtgaacgtttggcttttttggaagcacatctgcccgaagtagagcagcgtgatgatctttccattgaacgtatcactttgtataatcaatcaggccgctatgctgaagcaaaagaattgattgccgcgcgtaatttccatccatgggaaggaggagaaggaaaaatcaccggacaatatgtattgtgtcgtgtagaattagcaaagattgctttaagtgaaaaacgctatgccgatgctttagttcttttggatgaaacggatgcttatccatttaatttgggtgagggaaaattggcaaatgctgaagagaatgatatctggtattataaaggtgaggcgtttcgtggcttgggaaatgagcaacaagctatagattgctttaccaaagcgaccattggttcttcagaaccacaacaggctttcttctacaatgaccaacaacccgataagattttctatcaaggtctggcatggcgtgcgttgggtagagaggataaggcacgcagctgctttaacaaattgataaagcatggtgagaagcatttgtttgaccactgtcggattgattattttgctgtttctctgcctgatctggctatttgggaagatgacttggataaacgtaactgcattcattgtaattatgtgatggggttggggtatttaggattgcgtgaaatgggaaaagccattgattttttggataaggtgcgagaattggacattaaccatcaaggtggacaaatccatcgtaatttgtgtgctgtatgagaaaaaagaattttttccttttgttggtaacattgtgtctgtgcatttttgcacaggcacaaatgctgtctgtttatgaattatcatccccaaacgggcaattggtacttactgtagagaatggaagggtcttacaatattctttaagtttggaaggtaggtctgtcattcatccctctgctatttgtatgacgatgcaaaatggtaatatatggggaaagaatggtgaagtggtagggacttctacaagtagtacttctgagaaggtttatccggtagctggtaattatcgtgaattaacagaccattataatgaactttccttgaaattcaaggatggttattcagttatattccggatgtataatgaaggaatggcatatcgtttttgtggaaatcttccggagcaggattctttgattgtagttgatgaagaagcttcttttaatctggctgatgatccggcagttattttacctgaaacaactaattttacagcttgggagttgagcaatgtgctttacgagggcatttctaaaatagaagaacataaatatggtattacaccaactttatttacaaacaaggtgcaaaatgtgcgtgttgtggtggctgaatcggatttaaataactatccgggtatgtatcttcgtaaagaagatggcaagatgaaaggttattgggcgacctatcctaaaacaatagagatgggcagttggggaaattttattacggtggtaaaagaaagggagaattatttagcacgtactgctggtaaccatgcttttccttggcgtatggctattgttgccaaggatgataaggaactactgactaatgaaatgatttacttactggccaagccccaacaaataaaggatacggattggattcgtcctggtaaagcaacttgggaatggtggcattgtgctattttggaaaaagctcctttcccttctggtcatcaaaacctttcgacacagatgtacaagtattatattgatttcgcttccgaaaacaaaataccttatctactggtcgatgccggttggagcaatgtttttaatcatgcagatttgaataagaatattgatataaaagaggtgatacgctatggaaaagaaaaaaaagtaggtgtatggctttggactgttgctgctactttattccagcatccgcattgttatttggattctatcagcaagtggggtgctgttggggtgaaaatagatttttttgatcgtgatgatgctcaaataatccctcaatatgaaaatctggcaaaggcttgtgctgagcggcatcttatggtggattttcatggatgcagcaagcctaccggacttcatcgggcatatcctaatatcctttcttatgaagccatgcgatgtgcggagtgttttaagtgggataccacttctaatccggattatcagcttcaatgtatctttgcccgtatgttgggaggtggaattgattatactccggggtcgatgcgtaacagcacattggaaaaatttaagccgatcgatccggggttgcctagttcattggggactcgttcacatgaattggccttgtttgttgtactttccgcaccatttgcctgtttatgtgattctccggatgagtatcgtaagtatcctgatattttaaaatatttagcggaagttccgacttcatgggatcagacgattcccttagctgcttgtgtgggcgaatatgctgtgttggctaagcagaaaggaaatacttggtatataggcggattgaacgcttggggtgagaggacaattcaggtggattgctctttcctgcctcaggataagaaatataccattgaaatttttcaggataaaaaaagaagtaacaagaatgctaatttatacgaacataaaataatggatacggataataagaatattattgaaatgtttatggcttctggtgggggatttgtaatggtcattcgtgaaaagtaatagagggcaatcctctatttcttttatattggcattatttatcctttttttcttttatctttggctcaaattttgaacaggctatgaaaaagactttgctcattttatgttgtttgtatgttgtatttacattacaggctgttgataagggattatccaatttttatttttctcatataacgggtgaaaatggactatcacaaagtaatgtgaaggctatcattcaggatagttacgggtttatgtggtttggtacaaaaaatggtttgaaccgttttgatggaacttctattgtacagatgaactgtgatgactatgtagtcggtaccggaaaccataatatttctgctttgtttgaagataaggaacgtcagttatgggtaggaacggatagaggagtctatcgttataatcctgccttggatatattcacggcaatgaatatggaaacagaggaaggggtgaatatgaataattgggtatctaatattgtggcggattctattggtaatatttggattgtgattcctgatcagggagtttttcgctataaggatgagaaactttatttttatgaagtaaccaacaaagagcattttaaaacagaagctccggattgtattttggtacgccctgatggtgatgtctgggttggtacatggggggtcggactttttcgatatgatagaaatacggataaatttgaacaatattgtgttgataaaaccgggcgttcgttaaagggaaagaatattaattctatttgtaattatggtgattggattgcaatggctattcatgaaggggaattgatgaaatataatcccagtacgaatcagcttgtaaaaatagatatacctgaggctaaccatacatttgtacgtaatgtggcttgttttgacgatgaactgtgggtgggaactcatgaaggcttatttgttgtgaatgagaggaagaataaaagagttcatttgaaacaagatttgatgcgttcgttcagtctgtcggataagattatttatactatttatcaagatcgggaagggggaatttggctgggaaccatgtttggcggagtgaattatctgcctcatcatgacttgttatttgataaatatgtacctggaagtgatgggcgttcgttgaccacaaaacggataagggaaatagcttctgataataagggcaatatatgggttggaactgaagacgatggaattaatatattggatattgcttctggacaggtaaaccgattgaggttagatgatgatgataaaaggagtcatatggttactttggggatgtttgttaaaggaaaccaactgttttgtggtttgttcaaacaaggattggatgtgattcagttgccagagaataaagtttatcattatactcctgaggagttgaatataggagaaggaagtgtttatactttctttatagatgaggcaggatataagtggattggcactggttggggactttataaagcggctcctgcaagttttcattttgaaaaggtggaagaagtgggttttgattggattttcgatgcatttcaagataaggatggaatgatatggttcgcttccatgggaagcgggttatggaagcatgatccgggaaagaatagctttaaaaagtatacttatgaggaaggtaaggagaatacattgggatccaattctgtcagttcggtaatgcaggatagtaaagggcggatttggatttccactgatcgtggtggaatttgtcgttacaattctcaaacggatgattttacctctttttccattaaagacggtttgccggatgatgtggcttataagatattggaagatgagcaatcaaatttatggttcgggacaaatcgggggctggtcaggtttaatccggaatcgaaggacgtgcgggtatatactactaaggatggtttgttagggaatcagtttaattataagtcagctttgaagggggaggatggtaagttttattttggcggtatagacggattgattgcatttgatcctaattcttcggaaaaaatcaatttcttgccacctgtttatatctcaaaattcagtatttataatcaggagataacagttcatactcctaattctcctttgaaaaagtgtatagaacatacggatgaaatcgtattgccttatgatcagtcaaatattagttttgatgttgctttattaagttattctactacggaatccaatcaatactattataagttggttccgttggataaagattggataagagcggcaagtaatcagaatatctcttatgcaaaattgcctccgggaaattatactttacaggttcgggctaccaatagtgtcaaagaaggtccctatgctacccggtctttatctattgttattctgcctccttggtggcagtcggtttgggcttatttcctgtatattatctggggaatctgtgttgtactttgttggttcttctggtataaaagacgtaaagagaaacagatggaagaaaagcagaagttatttgaagttgagaaagagaaagaactctatgaatcaaaagtcagtttctttactgagatagctcatgaggtgcgcacgcccttgacattgattaatggtccattggaagccattgaggaaatggatatcaaggatcagaaattgaacaaaaatttgaaagtaatcgggcagaataccaagagattattagacctgaccggccagctgcttgattttcaaaaaataggagcgagtaaatttgaattgaaatttgaaacggttgatgtaacggcattgctgaatgaaacgattactcgttttgagcctactattctgcaaaagcagaaagagttattgcaacatattccccaagaaagaattatggctgccatagataaggaggctatcacaaaagtattgagtaatttgttgaataatgctttgaaatatgcccgtcataccattatgatagatttattccaagatggagcagattttacagttcgtgttgtcagtgatggagaaaagatacctgaagcgtccagccagcagatttttgaacccttttatcaggtagaaaagaagaaggatacagttcggatgggagtaggcatagggttacctttagctcgttcgctagccactttgcataaaggcaggctttatttggatatagaacaaccggagaatacatttgttttgaccattcctttgaataaggaggaagtaaggcagcaaatagagaaggtcgttgagcaaaatatagaagtattggatgaggaaacatcaacagaaacagaccagatgaaaggttatactttattgttagtagaggacaatgaaagcatgagatcttttatctttgaacgattggaagccttgtttacagtagaaaccgctgtgaatgggcaggaagcgttggatattttacgtagtaatcacatagatttggttatcagtgatataatgatgccggtgatgaatggctatgaattatgtaaggaaataaaggcggatattgatttgtgccatattccggttattttccttaccgccaagaacgatttggagagtaagattaacggattgaagataggagcagaagcttatgtggaaaagcctttttctttcaactatttgaagactcagattttatctttactcagtaatcgaaggaaagagcgtgaggcattctccaaacgtccttttttccctgtgcataatatgcagatgaacaaggcggatgaggagtttatgaataaagtgatcaatgtgattcaagagaatatctcggatgaaaatttcaatgtggaacgtatggctgatatcttatgtatgagccgttccagcttgttgaggaaaataaagattctatttaatctttcacccatagatttcatccggttgatccgtttgaaaaaagcagccgaactgattcaggaaggtaagtatcgtattggggatatctgttatatggtaggaataaactcttcatcttacttcagcaaattatttttaaaacaatttggaatgactccgaaagagtttgagaaacagtatcaaacatccaaggaaaaagttaaaatagatctgacgggaatctctgattgaaagaaatgcagcaaaaaatgatgcatttgcggattctgcgggtgcagatgcgtcattgctgcaaaaatcctatttattgcagcgtttgtatattaacaggttgtcaagatatgcctacttttgaccatgcttgaaaggaaaagaattccggacagtaaagcaaaccttaagtagatttatctctttgacaaactaataatattatgaagaataattggttaactttaaaatcattgtttctctgtgtttctgcattgggcgtttccggtcttattttatccgggtgtactgaaaatgcaaatctaaatgtaggtgaatggtctttggagtatgatgctcacgctaatggtattgatatcagcaaaggctctaagcttatttatgataatgtatatgcagcttataagttggcagacagtgttgtttcgactcgtgattatgcaaagcatcatgtttctacaaaaaaaatcaatgattattttggagaagggtatcattatgaggtgacttataccgggaataatctgcctgcactggttcaatctttttatgtatatccggcaaaggattatgtgctgacagatttcactttggagagtacgactgaaatagcttcgaattatatggcaccggtcaatgtggaccgaatgcctgaagtattgaaccagggagaaaataatcgtgcgcttttcattcctttcgataatgactgttggatcagatatcaatctcatccgctcacatttacagaactgactagttatgaagtcactgccatatttaataatgatgaccgtgaagctgtggtggtaggttctgtagaacatgattcttggaaaacaggtataacaataggtaaaggtaatatatataatgtaggttcgttggtatgttatggcggtattgccgataagacaacacgtgactcgaaacctcacggtgcattgaaaggtacaaaaatcaagtcacctaaaattttagtaggattttttgaagactggcgtggaggtatggaagaatacgctcaggctaatgctgtgattgctccgcccaaagcttggggtaaagctgttccttttggctggaacagctggggagcattgcaatttaatctgacctatccgaaagcattggaagtttctgatttttacaaagagaatttgcagtcccgtcattttgtgaattcggataatttggtttatacaggtttggattctggttggaacagtttttcagaagaggagttgaaagcttttgtggataaatgtaaggcaaacggtcaggtagccggcgtttattggactccgtttactgattgggctaaaaatcctgaacgtgaaataaaagaaatgccgggatataaatataaagatgtatatctctatgcaaatgggaaaccgcaggaattagacggagcttatgctgttgatcctactcatccggctattgaagctatgatgaaacacacatcggagctattccatcgggctggctttgaatatgtgaaaatggactttatgacacatggagcaatggaagccgacaaatggtataatccggaaatacaaacaggtattcagggatacaactatggaatgcaattgcttgacaaatattttggtgatatgtatatcaatctttctatttctcctgtttttcctgctcattatgctcagtccagaagaattgcgtgtgatgcatggaacaagatgaaggataccgaatataccttaaatgcactttcatacggttggtggcaggataaggtttatcagtttaatgatcctgaccatattgtattgcgtgatgctacagatggtgagaacagagcgcgtgtcacttcgggggttatcactggaattttcattgctggagatgatttcagcaaaggcggttctaaagaggtgaaagagaaagcgatgaaatatttgacgaatgctgagatcaatgccatagccaatggggaatcttttcatcctgtagatggaaatggtgaaaagtcagaaaatcagtttgtacgcatggataaggatggtaaggcttattatgctgtgttcaactatatggatcaagagttgaagatgactacagctttagagcgtctagggttggattcgtcaaaggaatataggttgaaagaattatggagtggcattgaaagtactgctaaaactaacctggacgtaacggttcctgcatatgatgtcgcaattttcaaagtggaagaataaaccaatataaactttaaatcgtacttaaatttacaaattatgaaaagaattaggcttattaatttaatccttatcatgttttgttgctgtaatatgttggcacagaacataacggttacaggacaggtggtggatgttacatccgaacctatcattggtgcaagtgtagtggtaaaaggtacaaccaatggaactattaccgattttgatggcaactttacattatcagttcagaaaggggaaacattacatatttcttatataggatatgttgcccaagatgtaaaagtaatgggtaatcagcctgttaaagtggtgatggcggaagatactgaaacattagacgaagtggttgttgtaggtacttcgatgaagaagagtgatttgacaggagctgttgccagtgtcagttctaaagttttggaagaaaaaccggtgacgaatgtaaatcaggctcttcaaggccgtgttgcaggtgtgttcatttctcagcctacacgtcctacggatgatgcatctattaaaattcgtggtattaataccataaatggatctacggaccctatttatgtcatagatggtatggttatggataattcattctctggatttaatgcggtcaatttgaatgatgtggcttctattgaggtcttgaaagatgcatcagctacagctctgtatggttcacgtggttccaatggtgttgttgttattacaacaaagaagggtaaaaaaggcgaaggtaaagtttcttatgatggctggattggctttcagacctacgctaatactccaaaaacaatgaatacccgtcaattatttgaacttagaaaggaagcttatacgaatggttatatgcaaacaaatcctgacggggatgtcaatgcttatgtcaatgatgtgataatgggatcgaatactgcttttgctgattatgaattcgatgcttacgacaataataaaaattatgattggctggatgctgtgagccgtactggagtacaacacaatcatgtagtaagtctttcgaatggcaatgataaaggttcttattatattagttttggttatacagataataaaggtgtaattgaaaagtctgaacaagaaaaatacacaggacgtattaatgcggatcaacagattaaatcctggctgaaagtaggtactaatacaacttttacacgtaccgagaacacgttggttgatgatggagtaatgaatcgtgcacgttgtgctaatccgatgttggaaatttctgatgagattgaaactttaaattggcaaggtatttttgatcaaaataattttaatccgttacgatctttgaaagttgataatgatttggtgtataatcgtttgttgagttctaattatattaatatcaatcctattgaaggattgaacttgcgttctactttctctattgattatgctcagaagcagcagaataaatataccccgaatgatatttatgagtcggaacgttatggaacacaaggggaagccaaagatgatagagatacacgtactgtatggcaatgggataattcattgtcttatgaagtctcttttggcaaacataagttgaatgcgatggttggtaccagtgctacacggactacgtataattatattaatgctacggcaacagggtttggcactaatttatttggatatcatagtttgggatctggttataaaaaagatcagcgtggcttaagtacagcttggtccgagcaaacattattatcttatatcgctcgtgttaactataactatgcgggtaaatatttattaacggcgactgcgcgttacgacggttcttctaaatttgctaaaggaaatcagtggggtattttcccgtctgtgtctgcagcttggaatattacagaagaaaagttcatgaaaaatcagacaatttttgatcagttaaagttacgtgccggttttggtattgttggtaatcagaatattgatgattttgcctatttatctttatataatgtcagctatacgggtacttccgatacaggttatacaaattcttttgtttccaatgggcgacgtggtactccggatattagttgggagaaacaaaaacaatggaatttaggagtagatatggctttcttacagaatagagtacgtttgtctgttgatgctttcttgataaaaaataaggatttgttaatgagtcattcgttacctacgactactggtttcagtagtactattgaaaatataggtgcgattgaaaacaaaggtttggaatttgctttgaatgccaatttggtaagagctaaagattttgaatggaattttgcagctacattgtctatggataaaaataaggtaactcgattatatggtgataatgatgttgtatataatgtagatagtgatcgtaatattcaaaaagaaggtaatttattccttggtgagtctcgtaacacaatttatatttggaaaacaggtggaattgcccaagaaattgatatggatcgtttgaataaaataaattggaatggatataatgtgaatcccggtgatttgtatccattggattatgataataatggacagatagatcaaaatgaccgtgttgtaattggttccactgatcctaagttttatggcggtttttctacagatttttcttggaagggattgtctttaaatgcagtcttcagttattcttatggggctaaaaaattgagcccttggtatgaaactttgattggaagtactggatctggagtcgcatcaacggatttgttggatcgttggactcctgaaaatacagatgctgaatttccacgtgtgttggctggctttgattataatcattatggtgcaagttctatggattttagtgtgcagaaagcttctttcttgcgtttgtctgctttgacattggcctatactttcccgactaaagtgataaatgctctgaaactgactaacctgcgtgtttatgccaccggttctaatcttttttgtttaactaattataatggttatgatccggaaaccggtgattggtatcctcctacacgtatgtatacttttggtcttaatttggctttttaatggaaggatagaataaatagtctaattttaaaagaaaacacaacaatgaaaaagatatatagatatagtgcgatatatgctttggctttgtcctttgcactgaatacttcttcttgctcagactttctgcaagtagaacctacgggatctttgactgaggaacaagtatttgaaaaaatagataatgtagaacctttagttcttggattgtataagagttataggggctgtaaagaagggcgtaatggattgatgccttatttggggacagatgaaacacagcagggtaattatcagttgatttcttcaggagatcaagctggtatggataaatataatggacagttgaatcctacatctactcaggttagttctatttggaacaaccgttggccggctgtcgtttcagctgctaaagctatatatgcattgggtatgaccactgaagaaccggaacgtgctaaacagttgatgggagaggcatgctttattcgtggtttattaatgtttgaattaagtatgtattggggtgaaatccctgtgatagatatgaaccgtactgatgaattgggcttgggacgtcaacctttaaaaactgtatgggaatatattattaatgattttattactgctaccaataatttgcctgagtcttataatagtgaaccgcagcgtgctactgttggggctgcatgggctatgttaggaaaggcttatatggcagctccggaagagacaggattgcgggattttgccaaggctgatgaatgttttaagactattatcaatatgggacgatatgaattactaaatgattatgctgacttgtatcgttatgataatcctaatacaaaagagtcattgtttgagttgcaatttaataatgtatatcctgattgtaattattgggagtttgattgtggttctcgtgcatgtgactcttggtttggtcagggatgctctttctctggttacgattttctagttccgactccttttgcttataagacagtagaagaaggtggcatttgggaagatggagatttgcgtaaagaagaagcattgcgttatgattttacgtattatactaataaatattcggaggatggtacatttgaatatgtaactcctgatttgtcaaagactcaatggacgggaactacagatgaattggaaccacatataaagaaatatgaagactatcgtacagatattctttcagggcttggcattaataatatgtggaattctggtaagaacttttcaatgattcgttatgctgatgtattattattgcatgctgaatgtctgaatgaattaggacagacttcggaagctgtacagatcgtaaataatcaaattcgtactcgtgcatggggaggaaacttgccagaagataagaaatggaattcgggaatgagcaaagatgaattccgtgataaggtaatggatgaacgtttgcgtgaactttgcttcgaaggctggagacgtattgatttgcttcgtactaataaatttgtagaattgataaaagaacgtaaccgttgggcaaaagaatcaggaacaattcaagatttccataagcgctatcctattcctgatactgaaattaaaacaaatgatgcattcggccctgaagaccagaatccgggatatagcaaataaattgtttctatccatataaattagaagcatcaggaggaaacatctgcttcctacctgatgcttttaatttttctgaaatctggaataatatgaaaatagcacataaaatagaaacttatacctctgacggagaacctgtattacgatttactgtgatgaattcttcaggagtctatatggaattcacgaattggggggctcgttggattacagcttcagtacctgatgttcaaggagcattggacaatgtgctgattggttatgattccttggccggttatttggaagattcttattatatgggggcaaccatcggcagatttgcaaatcgtatagccgatgcttcttttacaatagataggaaaaccttccatttggaggctaatgatgggaataacaccaatcatggcggtttttctggctttcataacaaggtgtggcagtgggaagaattaccggatggcatccgttttagtctgtattcgccagacggagaaggaggttttccgggaaatatccgcgtgataacagactatcgtttcaatgaggacaatgaactttctgtacggcattatgcggaaactgactgtgctacttacatcaatatgacaaatcatgcatatttcaatttgtgtggtaagggaaaaaagataacggagcatcggttgcatattccggccgaccggatattggatactaccccggcatttattcctacgggaaaaagaatgaatgttaaaaatacgccatttgactttacttccctaaaaccaataggtacagacctgtatgctgaccatgagcaattactttggaataaaggatataatcattgctatatattgaaagatgaaatatctgtggagatgttagaggctgcctctttatacgaacctgttacaggacgaaatatgacagtgatgacagatttgcctgctgttcttttgtatacagcgggatattatgaacgaccggatacagccgtctgtttggaaacacagttttatccggatactccttctcattcggattttccttcctgcctagtgttaccggagaaagcttatgaacattgtaccttgtttcattttcaagtgcaaaaagaggaatagatgattgataaatatgaaaagactataatatgaaaaacgtaaaaaaaacatgggttgcattagccctaatgggatgtatgcaagtactgcatgcccaaactgtatatttacatagcgataacccacagatgagatggaaattaaagcctcaggctgaagtcggaacggatgtgaaatcactttgcgaaaacggatataatgtttctgcctgggtagatgctgttgtgcctggaacagcttttaactcgtatgtaatagcagggctggaaaaagatcctaactttggtgacaatattcatcaagtaaaccgcgacaaatacgaccgtagcttttggtatcgtactacattccgtgttcctgccgattttacaaaagaattgatatggttgaattttaatggggtaaaccgtcgtgcggaagtctatctgaatggaacgttattgggtaaactggatgggtttatgcatcgtggacattttaatgtcacttcactagtaaatcgtgataaagaaaatgtattggctgtacttgtccatatacctgatactccattggctaatcagggcagccctacctatttgtctagtggtggatgggattggatgccttatgtgccggggttgaatagtggtataactgataaggtatttcttacgaatacgggaacagctactttaattgatccttggatacgtacaaatttacctacccgtgccagagctgatttgagtgtggcgcttgatgtcaagaataactcggtcgaaaagacgaaggtattggtgcgcggaacaattactccgggaaacattatttttcaaaaagaattagaggtgaatgcccatactactgaacaggtgaagtttgacaaacgttatttcccacaactgtgtatagaccagccgcgtctgtggtggccgaatggatatggagaccccaatctttatcattgtaagttcgaggtgatggtggatggaaaggtttcggaaacgaaagatgtttcttttggtataaagaaatattcttatgataaagaaggtaatacattccatgtttatattaatgatgttccggtatttgtcaaaggggcgaattggggaatgtctgaatatatgcttcgttgccgtggtgcggaatatgataccaaaatccgtctgcataaggaaatgaactttaatatgatacgtaattggctcggttctgttacagatgatgaattctacgaggcatgtgataaatatggcattatggtatgggacgatttttggataaactctaatccgaatttgccttatgacctcaatgtgttcaataataatatgatggagaaaatcaaacgtgttcgtaatcaccctagtatagccgtgtggtgtggcgataatgagtccaatcctcagcctcctttggaaggatggatggcggaaaatatcaggacttttgatggaggtgatcgttattttcaagcaaactctcatgctcagggcttgaccggtagtggtccgtggggagcatttgaaccccgcttttattttactaaatatcctgatggcttggaaggagatccggcgcgtggctggggattccgtacggaaattggtacagctgtagttcctacctttgaaagttttaagaagtttatgcctaaggagaactggtggcctcgtgatgaaatgtggaacaaacactattttggccaaaatgcttttaatgcagctcccgatcgttatgatgcttccataaccaaaggttttggtaagcccgaagggattgaagattattgccgtaaggctcagcttgtcaatattgagtctaataaggctatgtatgagggttggctggatcgtatgtgggaggatgcatcaggcatcatgacttggatgggacagtcggcatatccgtctatggtttggcaaacttatgattattattatgatttgacaggagctttctggggggcaaaatcagcttgtgaaccggtgcatattctttggaaccctgtgacggacggtgtgaagattgctaataccacagcacgtgatatggaaggtttgactgctgaagtaaaagtttacaatatggatgggaaatctgtggaggcttatacccaatcagccatcgtaaactctcctagcaattctacggtgcaatgttttacgataggtttcaataaagagcgtaaaaatctgtcattgaataagccgacttttgcttcaagtaccacttatggacagccttcggatgctacggatgggaaaaaagatacccgttgggcagcggcaaaagcggaaaatgaatggatttatgtggatttgggcagtgtacaacctgtaggtggagttcgtttggattgggaggcgtcttttggtaaggggtataaaattcaggtttctgatgacgccaagacttggaaagaagtgtataaaactgatgagggacgtggaggagtcgatgaaattactttccctgaagtcgatgcccgctatgtacgtatgtttggtattgaactaggttggtggtttggttactcattatggagctttgatgtattgggtggaacacagcctagtgagggtttgagtgatgtacattttatccgtctgacgttgaaagataaatcaggaaagatcgtatcagaaaacaattactggcgtggcaacgaccgtctggactttacggctttgaatactttgccaaaagctgaactgaaaacttcttccaagttaattcgtaagaatggtgaggcggagatacaagcggtcataacacttccgaaatcggctaagggagtagcttttgctgtacatgtgcaggctgtttgtacttcggatggcgaacgcattctgccggcattgatgaatgacaactattttacgttgatgccaggagaaacaaagaatttgagcattacatttgatgagaatttgttgcagggcgacaaatataagttagtggtaactccttataataacaaataattcagattagtatgtgtactaataaatttattctgttctgtatggggatagtgatgagtgtatcatcttcagcttgggctggagatgacacccctctttataaagacagaacagctccaatagagaagcgtgtagacgaccttatgtctagaatgacattgcacgaaaaggtattgcaattgcagaatcgtgcgtctggtcggttggatgagattgaccggatcttcttgggggaaagttatgggacaactcatgaaatgagtatgtctgcttatgattgcgccgtgatgtataaagaattacagcattatatgcgtactaagacccgtttgggaattccgttgttaacttctgctgagggcatacagggtattattcagaataattgtacgctgtttcctcatgctttggcgcagggaagcactttcaatcctgaattaatacaacaaatgactgaggcggctggcgaagaggctaaggcgataggtattcatcaaattctttctccggtttttgacattgcccgcgagttacgttggggacgtattgaagaaacatacggagaggacccttatctgatagcggaaatgggagtggcgtttattaaagggtatcaaaaatacagaattacttgtatgcccaagcattttgtagcccatggtactccgtctggaggcttgaattgtgcgggagtaagtggaggagaacgtgaattgcgtagtctctatctttatccgttccgtaaagctataagggaaacttctccgtgggcggtgatgacttgctacagtgcgtatgatggagtgccggttacaggttcttcttattatatgactgatattcttcggggagaactgggctttaaaggatacgcttattctgactggggttcggtggagcgtctgatgacttttcatcatgcagcaggcagccgtgaggatgctgcgcgtatggcattaatggccggagtggacttgaacattgattcgacttacgaaacattggaaaaacaagttgaggagggaaggcttgatgttgcatatatagatcaggctgtgcgcagaatattgacggtgaagtttgaattgggcttatttgatgaaacttatggtgatcctaaactggtgaagaaggtcgttcgcaatgctgaaaaggtggtattggctaagaaagtggctgacgagagtgccgtattattggaaaacagaaatgatattcttcctttagacttgaataaatacaagtctgttgcagtggtggggcctaacagtaatcaagccgtgttgggcgattacgcttggacgatgggggatactaaagaagcagtcagtttgttgcaaggattgcaggaaagtgcaggtgataaaataatgatccgtcatgctgaaggatgtgattggtggagtcaggacaaatcacatattgccgaagctgtggaagttgtccgtaacagtgatatagctgtggtggcggtaggtacacgaagcacttatctgggaagaagtcctaaatattctacggcaggtgaaggatttgatctttcctcattggaacttcctggggtgcaggaggagctgttgaaggagataaagaaaacgggtaaacctatgattgtcgttctgattgcgggtaaaccgcttgctatgccttgggtgaaagaaaatgctgatgcagtgttggtgcaatggtatgcaggtgagcagcaaggacgtacattggcagatattttacttggaaaggtgaatccgtcgggtaagttgaatgtatctttcccgcgtagcacaggtaatactccttgtttttataatcatttcgtgacagatcgtgaagaaccttttgaccagccgggtactcctgaagaacctaaaggtcattatatctttgataaaccggaacctttatggaactttggacatggaaaaagttatactacgtttgattatgtggattgtgcactgagtgatacgttattggctgcaagtgatacattgaaagtatccgttatgatcaagaatacgggtaggtgcgatggcaaggaggttgtgcagctttatgtacgtgataaagtaagcacggtggctactcccatccaacagttaaaggcatttcaaaaagttctggtcaagtcgggcgaaagtcaatgtgtggagctttctttgccaatcgcagaattagctctgtataatgcaaaaatggaggaagtggtagaacctggggactttgaaattcagataggagccgcctcagatgatatacgctttaagaaaacaattactataaacagaaaataaacgtgcttgttttttgttatttcttttctgataacaagaaggcaaaccatgtgatcgtattgttagtactggtatgtatatattttcttgttaatttacaactattttatatgagaagcatcttgttttttctttcttttttcagcctgacgtgtatttcttacgccaaggtggtcttgcccgcttattttacggacaatatggttcttcagcaaaatacgaaggttacttttcatggtaaggcggcattgggcaaaaccttaaaagtaactacaggctggaataatgaagtgtatgtgactccggtgaataaggatggttattggactttgtctgtgcctactcctgctgcaggagggccttatacgttgacatttacggatggtaagaaattgcaattaaaaaatgtaatggtgggagaggtatggttttgttccggccagtctaatatggagatgcctgttgcgggttgggggaaagtcatgaattatgagcaggagatagcggaggcgaattatccttctatccgtttgttccaagtgaagaaaaatacttcagtaactccgttgagtgatgtggaggctacgatgggaggatggcaggaatgttcttccgccacaattcctgaattctcttcgctcgcttatttttatgcccgttcattatggaaggagttaaatgttcctgtaggagtgattgactgtacatggggaggaacacctgctgaagcgtggaccagctatgaaacattgaaacaggtactgggctttcatgaggagttggctaagatggaacaattggattttgaccctgttcgtatggaaaaggcctataatcaagagcgctccgagtggcaatctcttttttctaaggaagacaagggaatggaggaagataagccttgctggattgcaccggacttgtcagaagaacaatggcaggatatgtgtcttcccggttactgggaaaggaatggattgaaaaattttgatggagtagtatggttccgtcgtagtcttgaaattccggcagaatggattggcaaaccgttaaaactaaatttagggatgattgatgatgaagatattacttattttaatggggtggagattgcccgaggggcaggctatatgacaccgcgtacttataccattcctgcaaaattagtgaaggctggtaaggcggttcttgctgttcgtgtttctgattttggtggagagggcggtattcatggcaaggcggaggaactttatgtagaagctgatggaaagcggatcagtttggcaggagattggaaatatcgtatcggactttctttaaaagggtttccacccgcaccggtttctcccattcaaagttccagttaccctacggtgctgttcaatgcgatggtcaaaccatggactgcttttcccattaaaggagtaatatggtatcaaggtgaagctaatgtaggtcgttcggaacaatatgaagatttgtttcctgctctcattacggattggcgccggcaatggcgaagtgatttccccttttattttgtacaattggctaattttatggaatccaaggaaatacagccggattccgaatgggcggctttgcgtgaagcacaaactaaagcattaaaacttgaccaagttggtatggctgtgaccattgatattggtttggctgatgacattcatcctaagaataagcaagaggtgggacgccgtttggccttggttgccctggtcggtagttatggaaaaaatgtttccggttcggctcctgtattccggaattatagaatcaaaggggataaaatggaattggatttcggacaaaagcaagatggatttcagattaaaggtacaactttaaaaggctttaccattgcagggccggaccgtgtgttttatccggcagaggcgatggtccagaatgggaaaattatagttttttctcctgaagtttctatccctcttgctgcacgttatggctgggcggataatccggattgtaatttgtacggagagaacggcctcccggttgctcctttccggaccgactgttggtagagggcgtaagtcttaaccttttttcttctctttgtaagctgatggaggcactcccatcgtcttagtgaataaccgggagaaataaagagaatcctcatagcctaccaagggacttatttggttaattttcaggttggtaaaatccaggtaatgacaggcttcctgtattctgagataggtaagatatcgaagaggagaggagcctgtcttttcttcaaacagattagagaaataggaaaccgagaggtttacttccgcagcgatatctgccagacgaatggtcttgctcaaattttcttgcatgaaatgaatcgctatttgcactacatctttgtttctgtaactattgcgcatagagccacaatcccgatattcgccaataaatttcatggaacctaaaaaatggaagagactagtagtggcataaagcatataatttttgctatatccgaaactgatggacgagtagatttcttcgaagagtactaatctttctttgattcgtgaatcctcttgtggagtgatgcttttcggacggtcaaaaccggcactgaaaaatgcagcttttgttccattgaaatggatccagtaaatagtccagggattttcctcattactgccataagcgtgtgcttggtgttcgggtagaatgaaaaattggttggcggtaactgcatattgatgtttgtctaactcgaaccacccttctccttccatacaataaatgaggataaactcggttacttcctcggtgtcgcgtttccggtaatgaaaataggcatgaggataatatcctatatctgtgatgtaaagttcactgcctaacggatcttgctttaattcttcaatcagaaaagcaggaagtacgatagcgcgttctcctttaaatccatctttaattcgtggcatatatccatgtattagaattggataacaaagatagcatatttccttgattttacctacaatacaggcttgatttcgatgattttgagggtataagcgtcaaaattcttattttatggcgcatttgagtagggatttttgagcttctctctctatttttgcactataattttaatcgatgaataataccatgaaagaaagattgctcttcttgatatgttttttatgcatatcatttatgttaaaggcggcggataagccagtaattaaaattagtacagaaaatgtagaccttatttaccgggttggtgataatggacgtctatatcaaagttatttgggaaagaggttgaatcatgctacagatattgcccacttgccgcagggcagcgaagcatatctgactcatggcatggaagattattttgaaccggctattcatatagtgcataatgacggcaatccttctactttgttaaaatatgtatctcatactcggaatcaagtgtcgccgggggtagatgaagtagtgattactatgcaggatgataaatatcctgtaactgtaaaacttcattatgtggcttaccagaaagaaaatctaataaagactttcactgaaatcagtcatcgggaaaagaaacctgtgcagcttcataagtacgcgtcttccatgttgcacttgaatcgtgccaactatttcctgactgaattctcgggagactgggccagtgaggcgcatgtgaaggaacagcctttggaatttggtaaaaaaacgattgataccaagttgggagcacgtgccaatatgttctgctctcctttcttccaacttgcattggacggaaagtcagaagagaaccaaggtgaagtgttggtcggaacattaggatggacaggtaatttcagttttgtattcgaagtagataataagaacgaactgcgtgttatttcgggtattaatccgtatgcttcggaatatagtctgaaaccgaatgaaatcttccgtactcccgatttttattttacttacagttttacaggtaaaggacaggctagccgtaatttccatgattgggcccgtaagtatcaggtaaaggatgggaaccagactcgtatgactttgttgaataattgggaagccacctattttgattttgatgaagcgaaattggtgaagttgatggatgatgcagtagaactgggtgtggatatgtttttgttggatgatggttggtttgccaacaagtatccgcgcagtggtgatcatcaagggttaggtgactgggatgaaacggctgacaagcttcctcatggcattggttatctgacggaagccgccaagaaaaaaggtataaagttcggtatctggattgaaccggaaatggtgaatcctaagagtgagttgtatgaaaagcataaagactgggtgattcatcttccgaaccgtgacgagtattatttccgtaaccagttggttctggatttgagtaatccgaaagtacaggattatgtgttcggagttgtggacaatttgatgacaaaatatcctgatatcgctttcttcaaatgggattgcaatagccctattacaaatatttactctgtttatttgaaagacaagcagtcacatttatatattgattatgtgcgtggcttatataatgtattggaacgtgtgaaagcaaaatatcctgatctgccgatgatgctttgttccggtggcggtgggcgttcggattatgaggctttgagctattttacagaattctggcctagtgataataccgatcctattgaacgtttatttattcagtggggattttcacaggtgttcccagccaagacaatgtgcgctcatgttaccacatggaataagaatagcagtgtgaaattccgtacggatgtggctatgatgtgcaaactcggttttgatataaaattagcggatatgagtaaggatgatgaaacttattgccgtactgctgtacagaattataaccgtttgaaaccggtcgttctggaaggcgatatgtaccgtttggtatctccttatggcagtaatcatacctctactatgtatgtgggcaaagataaggataaagcagttgtatttgctttcgatattcatccccgttatgcggaaaaaacattgccggtgcgtttgcaggggcttgatgcagacaaaatgtatcgtgtgaaagaaatcaacttgatgcccggagccaattcttctttatcaggcaatggtgaggttttctctggagaattcttgatgaatgtaggattgaatctatttactacacagcaactcaacagtcgtgtaattgaagtagtagctgaatgattagggattgattgtatataatttagtgtattgccttcattatttgtttttatgaatgatgaaggcaattttcttttctatagatgaatgatatttgatcggtttgattatgaatcatagaagatgccgtgacacatgatagatcttcaggtgtcatcgttatatatgttacacttgtaagatatataatctttcgggtttaggttctatatcagagcggactgttacttgttaagaaaaaacattcatagcctccggaggttggaacaggggactaacaagtttgttcaagcggggctgttgcagggggcgggttttatatcttgggggaggtatatatttatatataggctccttcacatccaatttcccttccgtaccagaatattttttactcagaagacagatctgaccttctgaattacattaacctgcgcacatctacaataatcaactttttcttgaacagtctgtcgtatcttcatgtccataaataaaatgaaaaaggaaaatactgaagttttaactctggatcatggtagtccgctttttaccgttattggacgatgattaacgaatgtagccgtaccgataaagaattcctcgtaaataggacggaaaccaaagcatatgagatgggtttgtttctttcgacgaaatcaaaggccggtcatgattgcgttccatcatggtaatgatattctttgtatatactttgtttatagatgttgaattgatgtctttatgtgtgatatttgtcttcttgtgtaagatattttaaaaatcaaaaacaaaacgaaccgttttttttgagaaatctaacaagagatacccacatttgtactatctttgtaataagttggtcttttaagaaaacttgggaaaagcatttattatgaatcaatatccggattttgaccaaaagttatatgacgatcttcgccgtggtaaagagtatgcctttgctgctgtctttgaccgttaccatcggttattgtacaccatagcctatcgttttttgaaatcggaagaagaggcggaggacgcagttcagtatctttttatgaaattgtgggagcagagggaaacttttagttttgagtcgggtattcgcagtttgttatttactatcttgaagaattatatactgaatgaattgaggcatcgcaatctggtatttgagaagttgtatgaaatggcccaacaggtgaatgatgaggacgaagatgcttttttaacccggtttgaacatggtgaactaagaaaatccttgcgggttgccattgacaaacttcctcctcagaaacaaaaaatctgcttgctgaaaatagaatatgggttatccaatcaagagattgccgacaggatgggcataactgttcctacagtgaaatctcattacacacaggctataaaggcgcttcgtaatgcgattgaatctttgattatgtggtttcctgtaatatggatttatttaatagactgaaatgcactcatacttttatcggagtagggtgttattataaatatacgaaaaaaatagattatgaagatagatgaatcggtgatagataaagtacttgacaacaaagctgctcctggagaagctcggaaagttgccggttggttcgttacggaagaagggcgtaagtatttgtctgggcgattggaccgtgagatggaagagcttgcagaagagatgccggaagatgttagacttccttctatttccggcatgaagatgaaacagcggtttatgagtgagataaaacgtgagcgtggaaggagatcggtcggccgtaagtggatgtgggtggcggctgtattgttaccatttgttctcttaagcgtttctttgttgtttttggtgaaccggacggggattttctctgaaacggaatatgctgaaataagtgttccttatggtgaacagatgcgggtaattttgcaggatggcagtattgtacacttgaactcggattcccgtttgaggtatcccaagcaatttggattgttcaatcgtacggtggagctttggggagaagggtattttaatgttgccagagatgaaaaccgtccctttaaggtggatttgcaaggggtggaagtgagagtgaccgggaccagatttaatgtaaaagcatatgctgccgaacccaatatttgggtaactttggatgaaggaggaattcttttcagggatcataatgcgaaagagtacaggcttgttccgggggagagtgcggaatataatcgtcagtcggggaaatgcctgatttcccgcccggataatatggagcagatttcggcatggcgttccaacagccttaatttttatctgactccgcttaatgagattataaaggtgatggaaaggcattatgacgttcattttattgtgaaagattctacggtactgaagaacaggtttactttgtcaacaggaaaagtaaacgcgtcggatgtactctatgatttggaaactgtttctaatatctgttttacggaggtggaagacggtctgtttgaagtaggcaccaaataatgggaactataaaggtaaatgtggaatagatgtgagtgaatacacttgcatctatttttttttgagaaaacgaaaaaaaggactcatacctttttctggatgatgtgttagcctatataagaaattcttttgtttcaaactaatactattgatgaaaatgaaagcaagaaccaaaatgaagacattactgctgttgggagtccttttatttggctttactgtttcagcacagtcgcgaaaagtctctttagattttaagaatgagagggtggaaaaagttctggcatctattaaaagccagaccggtatgagcttggttttcagtgaccagttggtcgatgtgaatcgtaaggtaaccatgcaactcaaagatgtcacactgaaggaggcattgacaagacttctttcaggaattaatcttacttttgaaatcaggaacaacaaaatctattttattgagaagaaagctgtctcgcaacccggttctagaaagaaaagagtgacgggagtggtgaaagatgtaatgggagaacctctgattggtgctaatgttgtggaaaaaggcagaagtaccaatggggttatcaccgactttaatgggaagtttacgttggaagtggacgaatctgcttcgttggttgtgagctatataggatatttggcacaagatattccgacaaaagggaaaggggattttcatattatattgaaagaggataccaatacgttggacgaagtggtcgttaccggatatggagattttaagaaggcaacttatactggatctgcttctgttctgactacagaaaagctggaggctttacctgttgtctccgtggggcagatgattgaatcgaatataccgggcatcagtgtggttgccggtacttcttcgcagcccggtgcgaaaacaactttacgggtacggggagttgcttccatgaatgcttctaccgaacctttgtatgtattggacggagtacctatcccatcttatgacttgagtaactttaccagtatgtccgaagcgggaggaatgggattcattgaaacgctgaatccggcggatattgagagtatcaccgttttgaaagatgcggcatctgcttcattgtatggtgcgaaaggtgctaatggagtcgtgcttatcactactaaaaaaggaaaggaaggcaagcttcgtgtcaatatggcggcgaaatacggaatcacagatttcgcttatacatatcgtccgttaatgggaggcgaggaaagaagggaattaattcatgaaggattggttaattttcaactggataagggagtaagcgaacaagaggcacagcagtatgcggatgcgaatatagaccagtatgccaaacgcttgcctcaaggatattcggactgggagagtgctttatttaagacaggttatcaacaggattataacctgtctgccagtgctggcaaccaaaattccagttttatcggttctttgggatatactaaacagacgggtgtttccctgaattcagaaatggagcgctttacggggcgtgtggatgcaagtaacaagtataaaaaggtggaatttggaatgaacgcttctttttcgtggacaaagaacgttcatttacccgaaggtaaattttatggaagtgccatttatgcatcaaaagtgaatctgacgccttctactcccatttacaatgaggatgggacctatgccagcgggtatcgtgaaaacaatgggtataatccgatattggaggctgaggtgaatgattattacgctcggacggtacgtgctatgggtacggctaaaatagcttataatgtttgggataacttgaaggtatccagtgtgtttacggtagattattcgttgacaaaggactttttctttcagtctccggatggacgtgatggagcaacttatcaaggacggggacgtatgcagatgactgaccgtatacgttatacttcacagaacaatttaacttactccaaaactttcggcaagcattctgtcagtgcggtcacggctttcgaggtgatgaagtatgattatgaggatttgtatgctgcaaagaaaacttacgggcaggatataaacacttctttaggaaatgcggccgatccgatagatgctgaccagaaattgcaggaagatgcattaatgtcctatgtggccagtgtgaactattcttatgatgataaatattatgccagtttcagttttcgcagggatggctcatcccgcttgtctcccgatactcgttggggtaatttctggtctttgtccgcttcatggagactttctcaggaaaggttcatgcagccgttgaaatcagtattaagtgatttaaaacttcgtgcttcctatggggtgaatggaaatctcccttcttcatattatggttatcagagtacttataccacgggggcgttttatagtgggaaaccttctccgtgggaaagtacattggggaatgaggaactcacctgggagaagaattatgcactgaatttgggactggatatcggcttgttcagtcgtgtgaatgtttctttggattggtacacgcgtacaacgaaagacctgttgatgagcaagcaattgaattccatcagcggattttcttctctgctgaccaatgtggggcagatgcggaataccggtgtggaacttgaagttcgttccaataacatcaagacgaaagatttcagctggactaccgccttcaatttgagccataataaaaataagattctgaaactggcagatctgccttggtttgtggatggcaggtatgtacgtaaggaaggttatccatttaatactatttatctgcgtgagtatgcgggggtggatcctgagaccggaagtgccttgtattatgataaccaacaggatgagaatggcaattatacaaaaaataaagtgaccgatccggggcaggcaagtcctattccgttgaaagatattacgcctactatatcgggaggttttatgaatacctttaattataaattcattgacctgtcattcaatctatcttatagtttcggtggttattcgtatgataatgcatcctacattctgcaagatgatggttattcagtgataagcaataaaagtaccgagcaacgccgccgttggcagaaaccgggtgatataacggatgttccccgttttgtatatgggaataaaaaggggggtaactataattcttcacgtgccatccattctacggatcatattcgtctgaaaagtctgatattgggattgaatgctcctaaagcatggttgcagaaattaggaatagggaatgcccgtatttatttctcgggtacgaatttgttgacatgggctgcatacgaccaatatgatcctgaaatgagtggggtggtaggattctacacgcctccgttgaaaacttatgctttcggactggaacttaaattttaatcatcaattacactaaaaaacagaaccattatgaagaaaatactttttattttaggattcgtttcactgctcgttgctggttgtagtgatttcttcgatacagctcccagcaataaaattcctactacgatggctttccgtacagtaaccgatgtggataatgcggtgaacggattgtatgatctgatgtcgggctccggatattacggggctgctatgtttgcctatggagacatgaaaggagatgatatgcagagttctgaggaaagtggggtatgcaatacatgctatatgttcaatcatcgtcctaatagtttgaatgccggttcattgtggggacgacctttttatattcttcgtgaggcatggaatattctgaatgctattgccgaaggaaaaattgaaagcggggatgaaaagaagttgaatgctttgaaaggcgagacgatggcggtgattgcgctttgccagtttgatctgactcgttgctttggctatccttatacaaaagataaaggtgcgtcactgggtgctccgttgatagaccatttggtgggaacctatgagaatcctccccgttctactgttgctcaggcttatgattttattatagaaacgttggaagaggcggttacattgatgtccgaagagaaaaataacggacgtatgaataagtatgcggctcgtgcattgctggctcgtatctacttgtatcatgacgataaccggaaagcatttgatttggcggaccaactgattaaggatgcggatacatcgggaagttatgcactttatccgcatgagaagtatgtggctgcctggtcggtagaagccaagtttggttcagaatcgttttttgagatagccaatagtgtggatgatactccaggacgggattcatggggatatttattgaattggtatggctatcagaaggggtttgtcactcagaaatatgcggagcaaatgctggctgatcccggagatgtgcgcgggcagttgctggaggagaataaatatgcggggaaaacggtatggtggttgtacaaactgagagggacggacctgaagactgcaccgctggaatgtaacaatgtggtacttcgtctgtccgaggtgtacctgattgccgctgaggctggttgtaagttgggcggtgatgctgcggttcagggacttggttatttgaatgagattgtgaagcggggcaatcccgataacgaagtgacaatggctgactataccttggaccgtgtgttggatgagcgaagtaaggagctggtaggtgaaggacatcgtttctttgatttgctgcgcaatggcaagactattgtccgtaaaggaggatatcatcttcccagtgtggacgaagaggtggattgggatttttacaagtgtgtgctgccgatacctgaagaccagtttatctttagtcctgagatggaacagaatccgggatatcccaagaattgacatgctattaatcattatttaaatatatacgtatgaaaaacagaatagtaatatttgtggtatttgtgtgttgcttatggactatgccgggaatagtacgggcgcagttgtctgttcatcagtttgaccagttaatgaaaaagattgatgatgtcctgtggtacgagaaagtgggtgatattgcccatgtagataaggtgatattatgtggaccaccgcgttggaaggagtccaatcccacttcgatgagtgctggtaacgaacttaaattcagagcatacatttttattcccaaaagtgtgaaggaaaacaagaaatatccgttgatcgtatttcctcacagtggggtacatgccgatatggacacctattatgcccatatcatccgtgagctgatagcgcaggaatacatcgtggtggcagcggactaccggggaagcaccggatacggagcgggaacatacaataatatagattatggtggattggaaaacgaagacgtgtacatcagccgtaactatatggtggataatttcgatattgtggatggtagtcgtgtgggtatcatgggatggagtcatggtggtatgattacactgatgaaccttttcaattatccgggacaatataaatgtggttttgcaggcgttccggtttcggatgtaatcatgcgtatgggatatgccagcgacagttatcgcaaaatcttctcggccaagaatcatatcgggcagactgccaaggacaatattgcggaatacaaacggcgctctcctgtgtggcatgcggagaagttgaaagatccgttacttatctatactaataccagtgatgatgatgtgaatgtagtcgaggtggaatcaatgatccgtgccttgaaagcagaaggcaaaaaatttgaatataagatatttgagcgtgctcccggtgcgcatagttttgatcggttagatacttatgagtcaagcaagattcgtctggacatttataagttcatggggcgttacctgaagcccaataaaccattcggttcagtgaaagaattgcgtaaagcagcttataagttctgataattaacttggtgacaggataatggagggctggttgcttcatgtaatggggcaaccggcctttttatgactcttcggatggataaaaatgagtgaatattcatcttgtataaaagataagtggaaatatggataaagtgtacggataataagtgataattaaactttttgaatagcttggcggcttgttagcttttagaacgtagttatacattggtaatgagaaatagatcatgaaaaacacacgcttattatttgttatttggatgttgttcttggttttacctcaggggtattcacaagagaaaaaggaagattcatccgtattggggcaagtgaacggctttttgagtaaacatgtgaagctgactgcctacggtcagttcggttatagctatacggacaggaaagacttggatgtgagtcaggcggacaatcagttttttggaaggctggggatgctgatcctttcgggagatatcacggataaactgtcgtggatggttcagtatgaactgtttacttcacagctgctgaaactctatgcttgttacaaaccgtattctttttttcaggtcaagataggtcggatgaagacctgttttacattagagaaccagatgtcaccttcggtttatgaaacggtaaacttcagtcgtgtcattgagcgtctggcaggtttcagtggagatgtatgtgggaaccagggtggccgtgatatgggtttgcaggtgggtggtgagttgttcaagacctctgtcgacgattattttctggaatatcgggtaggtgtatacaatggttccggactcagcatgaaagatcataatgatgcaaaggattttgccgcatggttcactgtgcagcctgtcaaaggattgaagatgggtgcgtctgcctatatcggaaaattgaatgatgattatacggtggtaaatgatgaaacgggggaagaaaccatttataatacaaatatgaaacgtaaccgcatggcgctgagtacctgttatcagacccatcggttgacttgcagggggggggaatatttgtggggaaaagatggtagtatcaaccgcagagttttttatgctttaggatattggtttgccattccctcccgattggcggttgtggcaaaattggaacgctatgaagctgatacggcagtttctgattcagaaatgatttatacagtgggaggcgcttattatataacgccgaaaacgcgtatcatgctgaattatgcgcattttagttatgaaaagagtgtttctgtcaatgaactttgggcgatgtctcaaataggtttctgatagtacaatatgcaatgtttgtattgtgtctttttataccttgtcgtgttttataggttgctcaaagtcataaagactttggatgttaggtctttttctatattttttcttcactatttctgaaagtaaatattgaatcttttgactgaaatagtgagagcgtgaagcagaacttggcacaagatttcacagaacttggtgcaggatccggcagaacttgtatcaagattccagatactatggtagggaaaaatacagctttttgaaaccggacaaggatccttggacaacctttccccataattatcgggtaagtcttcatctctactatttgtctactgccctgtaaacgagggcttaaagcataaaaaaagcagttacattttactgtaactgctttaaagtgaaaaacttactttggtggtgccaccaggaatcgaaccttttgcttcggtttattctaactccttgagtgactgcacattttttgctttatcttttatgaaaaccattgaattggccttacgctaaattcattgtttttctttactaatctgacaaaatttgtctctttgacactgcaaatataatacacaggttcgatttctgcaaatattttcattccttttaattatagttttcaacaagagaaaaaaataaaaacatgtgctaaatcaaatgcattaagaatttatttattgtttggggtgttgactttaaagttggaaattttgcttcgcaaatcattagaaagatataccccttgaatctttattttgcatgaataaaccaaaagcactaaaagagcaaaaatacaaatgacgactatttcactaggcgccaaaaagtttggaactgacttgggcatgaaggcacctgcaaagagatctactaaacataagattatagctcccacctttcctaaagcactctttacctttcttgatttttgtatctctatatcgcttacaatttgtgcaatcacagtattattggttttcattgcatattctttcaacgtaaatatcgaaacttcttcattattaaatagaaaaatatatttcccaattaagggtactgctagtgtacataatgcaaagaggatacaagtaaaaaatttcacagtccaaatacagacaatacctaatattacgaatggaatcaggtttattagagttaaatcctgaaacgtaattccaggttctttttggggacaacacacacctaaatacaaatctgtaaacaccaatagaataaggaaatttgtccatatatccgtatcataaatcttgtggttgtcaaataacgcaatcaaatctttcatgttgttcataaatacttttttaaattaatagtttatagtaaagcggcagtcaacattttaaatttccactgtattaaaatagagcctatactgaaaaggaacagggctattggttatcaataccctaaaaccttattcgatataatgtctacagattataccattcaaatatattatgtgttattggattttacaaatatacagatactattcagaatgtcataacttctccataaatattattttgtacagtttttttacttataattcatgcctttatcatactttgcggcattgctgcatgaaggaggtgtgcatgccaaaacagaaaagtttttgagccattcatgtaaaaaggatatacaggatgtcatctgatgacttttaatgacatctgatgacactgctttttatgtttcggatataaagcggttctttgtcgtgtattaatagtgaactaatccatgaaaatgagatgccatgaacatacaagaagcaaagaacatcaggcttgttgattttttagccggattcggatacaagccggtaatacagcgtgggaacagcgtatggtacaaatcgcccttcaggacggaaaaggaagcctctttcaaggttgacctccataaggaattgtggtatgatttcggtctggggaagggaggggatattataacgttggccaaggagatttatcggacacaagatataggttatgtactacagtgtattgaggataaaagagccgtactgaaaccggttactgtttcctgtccgtttgaaaaggcatatcccgcctttcaagatttgaaaatcattcctcttgccaaccggatactgcttacttatctgaaggaacggtgcattgatctggaaactgcccgaaaaatatgcagggaagcccattttaaacggaatgggaagaattattttgccatcgctttccctaatatttccggagggtacgaaatcaggaacaggtatttcaaggcttgtattgctcccaaggacatcagtcgcatcattagcacgccggaaagcaggatttgctatatttttgaggggtttatggattttctgtctttcagaccggcttttccatctttggaagagggggattatatagtgttgaattctgtcagtaacttacagaaggctttttctttcctttcacaatatgacggcatccgttgctgtctggataatgataccgccgggaaaaatgcggtgcaggcattaaaggacaaatacggaatccgtatatgcgatttttcgcatgaatattccggatataaggatctgaatgaatatttgtgcaggaagaacaatctgctccatatctaatagatgtattgaaaagactgcctgatgatatacccttgtttctttcctgtcatatgtggcaggaggaaacaagggtgatttttcatgtggtgatactatgttaatagtagaatgtggtcagatgcgttttatggtcttttacaatctttacttcatgcatctgtccgtatatctcacgcatggataccggacaatccatcttttcccattcttccggggaaatcctcatgtcggaatgcctgaaacacagcatgaccatttcctgagaatcctcttctgcgaatatggtaccttcatggtcgttgacaaactgtttgagtccatcctcatccttacaggatatttctccgacgtacatatcctcgctcggccgggtgtttttgcggatatggattttgaaccattcccggctttccggctgttcaggtgcgccacactcccacagggctattttcgcatcgtagtaaacctccccgttttcacatgccccgtaatgcccccaatgcttgaaacggccggtagtccatgccttgaaccttacatcgcctgcctttaccaacagacactcaccgccatgcatatcgcatttgataccctctttgtcacgggacacgaatggaacacgggaaaaatcccggagtataatgttatctccatatacggcatctataaagaacagccgggaacgctcaccataaccggaaacaaagaacaggttgtctcctgtccgtggatactggccggagcgtgtcttttcgatgtgttccaccatggtattcactttatctatatcttcctgtacaagtccatatatccgatcataccagtagttcaggcggatgaaagtttctttgctatacttgtttgttgtctgaatcataatttccttattttgtgattaaacatttccggctttggcaaagccggtatttctatctcttacatgtcagacatttgtcttttgctctgatagtgcaaggcttggcgaaaaaataccgcagcgaagcgaggatgattttttcagccaaccagtccgaaggaccgccttgcgcatcagaagcaaaaggctacctttacatgtaagaaatagaaatgctgaccgatatatgattccaaaataaaaaaacgtataatctgccggttctgtaataagaaagccatgaaaccctctctttttatcgtttccatgactttcttatgtttatgtcgtgatacttggaaacgggtattaccaatgatcaaatgtttccaccctgtttttttccaacagaacaagaatgtccttttccttatataataatttgcctcctactttgtaatagggcagcctgccgttcattctgtaatcagccagcgtccttcgtgtcagcttcaatttctccgccaactcgctgtcggtaatgtaacgctctccgttcaggaccggacgaaggtttttctcctgatcatccagcattttggacagggtgcttatgttccgaaaaaaacgtataatctcagggctttctttggtcagtatgaattgagtcataaggattcgggggttacatggtgaatactgttttccaaataacgtataatatcctgacgcctgtaatataccttgcggtctatatggctgtaagggataatcctgcttctccgaagttgcaacagctttcggggcgagacattcataagcatacacgcttcctggttatcaatccagtcatccatactacagatgcctcctccgcatgtttcacgcattctcttttcaacggcttccaaagcctcattcatttccatgaatgccttagcttcgatacatacaaattccataaactctgctttttttgtccggcacgaaaatacgggaagtaaaagtcatgggcaaaaggatgtcatcaaacggcatcagatgtcatcagatgtcagagaccgctctgtttggggaagcaaattaaaagaatggctaaaagtctgtttctttaccggaaaaacagtatttttatcccggacaatctgtccgaaaataaaaaaacaggaaatatggaactgataatcaatgcaacattattactaacggctatcgttctctggatatacggacaatactggagaaaaaagtgcggcaaggtgctatgccaatatgcagcagcctacgatgagcgggaagacagggagaaaccgctacgtcaagccatcatagcaggaaatcctcatgcaccgctgttatatgcgctgacttgtcctgagctgtttgataaagtccgtccgttgcgattgttctcattcgggagcattcgctgcgtgtttgccggctattattttcccaaacgctttgaaagctggctttgtgatgaccagttggcattcgtgcaaaaagtatatgatttcaaggatggaaaagacagctgtacggaatatttttcacaagcattcctgcttctttccactgatgaggatattactgccatgtttatgccgtgcagcacatcagaccgctattacagacgtttctcaggtattgccggttttctggaaacgcatggctatgtccgttcaggactggatttaatatgcattacggaaagcagggagtgtaaacacgcctcagaaaaacgctctgaaataaataccgccaactatatgatgtcaaacgatctgtacggaaagcgcgtggtgattgtcgatgatttgctgaccagcggatccagcctgatggaatacgcccataatctggaaagggccggtgccaaagtggaaggtgctgtatttcttgcccgtacctttcagatgccttcgccggcaaaagtaaaacgcctggtatggaaacgccatctatcagtcctgatccggagaaggtctgacgacctgtaaattgtaaagtttacattcggattttacaattttacacctcgaatttttacatttcaatttcccctatactatttttatatctgtattttattgatttgcagtgttatataattccccgtccaatataaacggataatgtggcatacatttttcactgaacatggcatatactcttgaaagtgcgcacaagaaaagggtattccagtaataacctttaaaaagacaggagaaaattgccatgatgtatatagacaatgaagtgcttgaaaaaatgataatgaccatagtggaaggttttgaccgtatagaaaagaaactggacaggatgggacgcgtgaaggactgcctgaatggagacgagcttttggacaactatgacattgccaaactgctaaacgtgtcattgcggacagtcgcccgttacagggaaaaagggctgatccgttattaccagacggacgataacgggaaaaacttctacagaagctcggaaatacaggagtttttacagaaacgtgggaaaaaagataagggcgggaataccaacatgggaaagttatgctaactttgtttcataaacagttgttatgaagacaaatgccaattcaagatataccgttgcagtccttattgacggggataacgcatcctttgagaggatggaagatataatgggctttgtttcccgttacggggatgccgttgtgagacgaatttatggagactggacgaggaaagcgctttccgcatggaaggaaagtgccagggagcatggattcaggcttgtacaagcttcctcccatgttcccggaaagaacacgacggacattgcactggtcatagatgcgatggatattcttcgggacgggcaggtggactgtttctgcctggtggccagtgacggtgattacagcctgcttgcccaacggatacgggaagccggggtgaaagtgctgggatatggggaaggaaagaccccggtgtcattggtacggtcctgttccgtattcctgtatgccgaccggaaggaaagcaaggcagaggagaacactcccgaattctttatccgaagggatatggagtatttcgacaaggcttttgagcaggcggctgacggcaaagaagaggtttccctttcactgatcggcggtgcattgaaaaaaatgatgcccaaattcaaggtcaggagatatggatgcaagacattgggcaaactctatgaaaagttggaccggtatgagctggtcatgacggaaaagggagtggcaaatgccgtacggctgaaatattaaaccgcatagcaggagtgttccaaaacgtcagtttctcctatacatcgttttatgtatcaggagaaactgacgtttgtgttctataccgggatggggtttacccgtaatgtgtcaagattgagataggctccccggtagaacgttcttccttccctgagcatgcgccacaggacgtcgcatccgatttgtgccaacatggaattgatgaagagatcctgtttttgcaatgcctcagtcagcgagcagctcggtcctgaatccttctccctgatggtggaataagggacttcctccgttatgacgttcatcttgggtataggcaggtattcagtggaggagggctgcggtatcttgcttttgacattacctatcagtacttgtccggtggtctgggcattgccgaaatccatccagtatatcggtgatttctcgtcatcgtatgaacgttccctatgctttttcaaaaaacgccacagaccggtccgtgaacgggtggtgtccgtgcaggtgatgatgatattcgccaaaacggaatctgatgttcctgacggatagcattgcccttttgcttcccatgaaaagccgaaaaagcggttgatacgggttacaagtgccaccgccttgttcagtccgagctcggattcgctgaacaactggcgtccgatgttcgcttccgtgacagtatcggggtcaaaaaccgtcaagtgcaggcccggatgtccgagtgcctgcaatgcgatactcattcttgccagattggtggccacctgcgatccggttccgcccgcaccgattacgaaaacggttacgggatggtggggattgagcaggtatctgtctgtataatgaatctttttcatatcaataagtctttaagttgtctgtccataggtttcaattcgttatagtcaaacggattggtccgtgccttttccgtcaccgaaaccagattgctttcggtgggattcctgcttcctcccaaatgggaaaattcactgagccagaagcgtttttcccaatgctcaaggagttttgagaaagtcatgttttccggaggagtcaacgaggcatttcccaggcagacactgcttcccgttacattgaaaaacggggcaaggaaaagcgggctgtcttctgccggtgcttctcccttataggcaaaaatttccagtctgtcaccggaagccctgtaaatgacaccgggtacatggaatgtcccgtccggaatattcagcctttcggaaaagaacatctgccgttttcccggaggattgtaccagatgtacctctcgtgtcccttgcgtgtatcgcaccacagcatattggtggggattttcccatgcggtacatcctgccggttatccgtatagtattccacaagggagtccataaattcatacgtaacggggacggcagcctccatccggcctctgtcgttgatcggatgcagttcgagataatatgtcccgtgtccatagcggccatcactgtattcgtaagcaatcagtgccgctttgggaaccatcacctgttgaagtttcttagtcagttcattcatgtcattcgttttaaaagttgtcatcaatatagcctgtaaaacacaccaaccatctggaaagcctttccggatagtcatccatctgaaaaagactgtccgtttccggtgtcagtagcttgtaagtgaccggagtaagggcataggtttcctgataatccgaattcatataccccttgacacactccgccaatgtatcatcagcagaatagaccagtatgacctggctttccattcccaccgggggaaaatcgcattcctcttcataagcccaatcgtactggtagcctgtcaataccgggctttccggagtaatcaatgccatgccgtcctcaatcagttccaacagcttcagctctttttccttttttgtccggtaattccgcacagcctcctccaaagacttgcagaacggtttgcccgacatccgtctgagtgctttcatccgttttccagactgataggaatctgccagccgtttgttcgccctgatttccttcggggaagcatcggaatcccggtttccccagtcttccagttcttctatggcaaagtcataacaaaatgtctcagtaatatcgtacagtctgtggtgtcggacaaatagccggatgaactccctgacaatgttcttcaatgatgccgaaagccgttcggtaaaatcaaccggaatccaaaacaaagtaggttccggccagtcatgatggcggaacagacagaaatgcagccttccgtccttcttttccagattgatacactccggtacacactcttccataactctgtacaactcggtaatattcaggcgggggcaaccccctttcctgtatcggaaagggagttttatacccataagttccgcatatcttgatgccgaccggtagagatagtcaaaattttccggagtcgtgagattgaccggagaatcattatccatatcctgatgccaataatccggtgcaaggggtgtgattctaccggtcagaaaagcattgtgcttcccggtggcagaagtatccttcttttccgttccgaggttccccttcggatgtgggacgaacttactgagagaataatcagccgtgccagtccatccttggcttgttctgaaagctgtctgcatgtttccttatccttttttttcttgttcataccgcttaccctttcactccgatggttgtcttgaagcggtaaaccgccttgtcgtcctcccactcaggaccatgtaccgttgccgtagtcagttcagggtaggtcatggaatagaagtccatcacctcgtttacggacagttcgctgttcggatcatccaacacgagctccacggagtccttcttgaatttgaatactctctgcaatcctttgatttcaagtgccatattatttttcttttatagggtttaacaatataccatatccatttgtgccatatccgtcatgcggcattccttcggaaagtccggatattccgcataagggtcctccctgagtagctcccggtcatcctcgtaatccttgtcgaagttatacattgcagcctcctgcaccgttgcatactgtgacggagccggttgttgcatccagcgattgtccgccaattgcggttgcggcacctgtaccggttgatggaactggatttcttgcggttgtggagcagcctgctgaggaaccggttgcggtgcaggttgcctatattgtacgggctgtacttgcggctgtgcaacgggttgcggagccggggcaggctgttcgggcatggacatcggaacttgctcttcgctccggtattgtggcgtctgggctgccatcggttgtggagccgattgctgcaaggatggctgtggatcagttaccggcggctgtaccatgtcgaacagacttccctcggatgccttcttctgcacttccgccatttttttgtcaatgtccgcctgtttgtccggctgtgccagtaccttagcctgcctgagccaggtcaatgcttcggaataatgctttcctgccgtggcatcctcagctttcttcagcagtttttccatcttttcccgtttttcacgggcttccttggactccttttccaccgtaggcttggaggttttgctttgtgaaaccgcctgctctgcctgcttctcgaacgattccaggttggtaaggataccttgcgctttctgtacgggtgcaccgacagcctgcaggaatcctgcatccagttcttccggcgtaccgttcaggatgagcgggacaatgcgttcgccggcctttactcccgaccgtctgggaacgacggcaaccgtcagattgtcgtttacccgtctgatgttgatactcaggtctgtgcctgccgtaatcatttggttgattgcttgaaaaaacataatggtaaaatttaaaatgttatacataagtttccttgaaaaaatccttcaggattctctgcctgtccggattcgaggcgatgcctttcaacggttccagatagtagccgatacgtctgggcccgtctgtcgtacagggaggctgtcttttgacaggtgttgtccggtttgtggcaggccatgcagccggcatgaccggagccgaggatgtaaatgtgtaagttctcatatcttctgcatttgatggttatacaagcatgcccatgacaatcaggacaaggattgttttcaagacaaaggtgaatgtcctgaaggcgagacggaccagtgttccggacataaggaacaggacagacaggtacacgggaatgacgcccttgcagtaaagcaggcatattcccgtaagcagaaccagtgcgaccacttgcctgcagatgttttcgatgagtttcagtttcatgtctttaaatttttaagaatgaataatcccatcgggatatgttttcccgattttataggcctccggcccttggattgcctttttgcgcaaggcttggcaaaagaaaataccgcagcgaagcgaggatgattttcttttagccgaccagcccctgaaaggggccgccttgcggcaaaaacgaggcaatccaagacctttgccgcttaaaagcggaaaaacgtatcttgtacatatataaaaaagaggcacagaccccagtctgcacctcttctgttccgtaccttccgcccagccgtctatatggaaccatgcggctgtccatcttccgaaagtttccggaaaatctcaccggtaacctcatttaccgtttccaatacgccatccagaaattctttctgtgtgagttctccctgttcaatccgtgccagctccgcttcccagccggaggtgagggaggcgtcagccactttcattccgcgtaccgtttcatataaaagaagaccttttggggtcgggataatgtatttgcccgaataccggatatatttacgctccagaagcgtacggatgatattcgtgcgcgtggatgcggttcccagaccggtcttgtccatatagtccgccagttcctcatccgtataaggggcagcgggcagcgatttcctgtgtataaggctgcatcccgttaccggcagcttctcctcccgaaaaagttcagggggtacgggacagaggtcgttgtcttccgcgacaagccgttccctctgaaagataccgagccaccccgcttccagaatacggtatgtacggattcggaacttgcgtgcggcacagaccgcttcaaccgtcgtatattccaccttgcagggcggcatgaacgtttcaagcatcctgccgacaacaagggtgtaaaccagcctttcctccctgtccagttcccccggctgtatgccggtgatgacaatggcatgatgctccgccgtgtcctgatttccggttacgcctttccttgcagcaaggtcgatcataccggcatattgacggaattccttgccggacagcagcttttccataaccggaggcaacatgtcatacacgtctccgggcagcagacggctggaagtgcgcgggcaggagatcagttttttctcatacaggctttgggtaatttcctgcacccgtatggctgtcaggttatggtaacggttcgcatccttctgaagcccggtcaggttataaagggcaggtgcggtgatttcctcagtccggctgttgaccgccgtgatacgggcatatcctgccgccttgcagtcctcgtaaagttccagggcatcccggcggttgcagaaatcttccacatgccgcatctttattatcttcccgttcttgcagaggctgacgaatacgggccagctgtctgcgggaatgtgattttccctttccctgtaccgtccgcttatcgctgccaatacaggggtctgtacccttccaagcgagttgttcccgaaaccgaccgccttgcagacggcatagctcgaattgactccaagaagccagtcggccttgttgcggctgtctgccgccaaaaacaagttgtcgaacaggctgcagggacgaaggttttccattcctttggcaatggcttcgtccgtcaaggaggagatccacaggcggaggcaaggtttcctgcatcccaaaaaacgataaagataccggaacagcatttccccctcgcgggaagcgtcggttgccgcaacaatggtgtcacacgcatcgaacaccccggctatcaccttcaactggagcaccgcattgatgtcgggattccatcccgtgtccgtctttacatgccgtaccgtcagaaaaggaggcggcagcagggggaagttctcccgctccacccatgccgtaccggtatctttcggcatcgccagggaaagcatgttgccgtatgtccatgttaccatgtatccgtttccgctcatatatccgttctcttttctgtcagctcccaaaacccttgctatctctctgcccacattgggcttgtcagtcactatcgctatcatattctttttccttttgatgttccgtaccgtcaggaacggcacggaacgtgagttatacttattgtttcccggtcaaactgccgcctcctccttctgacggagaccgtttatttccataaccggtctgccgttgccgtcgggtaccagcttcagcgtggcatccattgtcaggctgaggaccgaaatatggagtttcagcggaacgatgcccgtttcctttccttgcagcaacagttccatgttgccttccgcttccagttgtttcttactgatacctgcggccttcagaccgtcccagtcgatatcttccgtcttataaatatgacgggtattctgatccgtattcatacgattcgtttttttaggtttgtatgattgattctgtttctctccgggcaggtctatactgcctgcgatgcacccttcttctgctcctgctgttgtccctgtgcggtctccgtctgtgcggcacggcgggaagtgtccctgcggatgtccggattttcctgaaaatactgcaactgcccggaatagggattgactttcaggtaggaactgaaggtctgcccgttgtttttcagcccttcgacaagcaaagtcttgccatcctggaggttcgctttttcctgtgccgtgaacacgtgcccgtaaacctccgccggaatacgcggtgcctgctgctcgttgaatccgttcggcgtgcgtgaatacatcgtcctgccggtattcatatccagcttgacgaacgaggagaattcctccccgttgcgcccgatcatgttttccagatagaccggctgtcccttgcgcagggtttccctgtcttcggcagtcagctgcacgttgcagatttcctttggaatataaatctctccggtttccggattgtgccgcgtgtagttcgggcgccccgtaaccttgtctatcgttacaaaggacgagaaggtgtcattcctgttcctgaacttcatgtcttccaccagaatggtatgtccttcgctgagcatttttatctgggtgggcgagagaggcacgcctccgatggaacgttcgttgaaaatctggtttttcggaaagatgaattccagtcccctgcgctcggcactgtactggagtgtggcatcgaattccttgcctgctttggaagtcataccctccactttgacaggctgtccctccttcagcagcctgatctcctctgcggtaagtttgaccccgctcacttcctgcgggatgtaaacgtgctcctgacggacggcaaccagctcgttggtgctcttgtcgatggaaatcagacagggggtatattcactgccgcgcaggttgagttctgccacacgccccatgttgccggtctcacgcaggtttttcttgtcctcctcgttaaagttaaacccgaaataaggacgctccaactgcggttccttgcgtatgccgtgaatggccagtcccacctgtccgtcctgttgcgggatgagtgagagccttgcatccagtttggctgtcagcaaaccggaaagatggatggtcaggggcaccagtttgttggtcttgtagcccttcagcatggaatcaaggagtccctgctgttccagcgaagcctttgagattccgaccttttccaactcctcccagttgaccatgttctcattataccggtaacgcggtccttgcgactcctgcgctgcctgttgagcctggggctgctgctgttgctgtgccgcctgctgtacttcgctctgttgcaggggttcctgcggttgtgtctctttgtctgccatagctgttttttctttttggtttacactttgttccttcttgttttctctcggacggatttcgtagcgtttgaggaactctttcaccgcatccgtctgctttccctccgacaaatccctgatggcctgcttgttcaccttgtagtcgtggtaggtcatgcggagcaggcggaaatgggtaggttccttgagctggctccaaaaattcttgatgaagttttcgagaatactcgaattcttgtcgaatttcaggaatgagttttcattcttctcgtccgccggaaccgtcttcgcttttccgtccttgtcaatttcactgacagcctgtacaccgaatttcggatcgttcttgttatgaacaagcatcaattccgtaatctgttccaccggaagagcatcacttccggccttcggtttccgggtccgtttgggcttttcgttcgggatcttttcttgtgccataccttttcttttaggggttaatgaattgctttgacgcttcaaaggtatggggtatttccaaataatatgctgattttcaaaaaggtgtcatcagatgtcatcaaatgtcgtcagatgtcataaacatgactgttcccaacggctaaaccgtgaacggagaagaagggaagtgaataaacggaaagagagaagatacgtgaggcagaagggaaaaagcctgcgcatccgacaccagaaaagagcaggcgggcaggcaagacaaaaccatgcagaacagagggagctgaagccccctgtcttctcatgccttccgcttttttacagcaagactttcataagacctgtattccggctggatatgtggaatttcatggattatgaaatacggcctcttcaagcagcccatatcctttatccatgcgtcacatcggtcgcagtttgcccctgtaatcgtttttcaaatcgaatctggattgccgccgcattctttttcgtgaaaattttccacggcgaagccgcaaggaaaatttccacgaaaagattcggcaaatgcggccggcaagacaaattcgattttcctttgatgagggggaaaactgtatcgcaaacaaacctatctggaaattccgtgcaggctcattttcttgtaaagggtcgggcggctgattcccaacaaggccgctgcctgtgtcaggttccctttagagatggaaagagccgtcttgatctgttctatgtttcttctttcatctttctgcaaacacttgtctatcttctctttccccatggggtcagaaacgggctctcccgcatattggagccgtaaggaattgggggtaatcagttttcctttgcatatcaataccgccgcatgaatgacctgcttcagttcccgtacatttcccggccaactgtatcccagcagcatcttctttgccggttcgtcaaaatccaagacctctttccggagcaatccgcaagattgctcccggaaaaaatccgccaaaggcagtatatcctccaggcaattatgcaatgcaggtacggtgatggtaaaatcctgaaagcgataaagcaggtccttccggaaacgcttttccgcaacagcctcctgcaaatcctcattggtggccgcaatgatgcgcacatccatcagcctgtcccgttgtccgcctaccggacgataccgccgttcctccatggcacgcaacagcatccgctgcgtttctatcgaaaggttctccacctcatccatgaacagggtgcctccctgcgcttcctgaaaatatcctgccttttcctctgtggctccggtaaacgcccccttgacatggccgaaaaaggcggaaggtgccagctctttggacaaactgccgcaatcgaccgttacatacggcttgccggatctgaggctctgcctgtgaatcttttttgccaggtgttcctttcccgttccggtgcttcccaatatcagtaccgtcatatccgtcggcgctaccatgtgaatgtaccggttcaactcgcaaaaaggggtgcttttgcgttcatagattaccttggtgaaagcctcgttcaccgtccttatttttttgattacgggcagcagcctggtttcaaccagcggtttgaggatataatcttccgcacccagcttcatggtatgaaccgcagaatgtatctcttcataattagtcatcatgatgaacgggtgcatatagccgttctccctcatccactgcaacagcgtggtactttccccgtcaggcaatcttaaatccgccaatacgatgtcatcctcacggacggatgtcccaatgaccttcttagcctgtgccagcctgtaagtccttacagtatccaaatccgccttctgcaaaaaattgcagatataattacagaacaagacattgtcctcaacaacaattactctcataagctttcttagcctgttgtgccaaacatattatttcttttcctttttccaatacctgctgtacagtccgcccgaactcgtccacagaaaactctcccgaatcctgaagcagtgcgaacaactcatgcagcggcttgccggcatgaatgatctcccatgagcctgtcagatgatgtatccattctttcagtgcctcatgatcattcttttctgcacattcagccatagcctccatatccttcctggtctcccgaatcagggtatccagcatcttccgcctgttcccatatttcagcagggcatcgaggtctatctgttcagactgcctttcacttcccagacattccgtacatacctgcaaaagttcttcggcggaaaacggctttttcaaacagcccgaaaaccctgccgcatacaaatcccccgtatcgcagtttcccgatgcggtactcgcgataaccggaatgctccgtgaatttcccacattggccatgcgcaggagcttcaacacctcgaatccgtttgtccggggcattttcaaatccgtaatcaaaaggtcataactacggctgcggacatgctccatcagatcacgcgtgttctcacataccgtgcaagccaccccgtgatacgcaaacatttccctgattgccgccagcaaaacggtgtcattgtccaataccagtaccgtataggaccgtacggaaatccggctcctgccgctctccgccatcgcttcctctgccacagccaaaggaagacagacagtgaaccggctgcccacccctttccggcttgccacttcaatcctgccgtccaacaatccgaccagaccttttactattgaaagtcccagtccgaccccttcttccgcaatcgcattgggaagcctctcgaatgcagtgaaaatgcgtgtctgctcctcatcgtccattccggtgccggtatcttccacgataagcgtcaatacgccctggtcaaattgtgtgcgaaccgttacacttccccgctccgtaaacttgattgcattggacaacaagttgcttcctatctgtattatcctgtccctatctcctataacaaccgcatctccggcactcagcacgttcagcaaaaggttttttcctgccgccagcggcataaaatccgtttccaaaatctcggtgacggaacataacctgaacgggacaggaacggccttttccccgccactctccaaccggaaaaatcccaacagggaattcagcatggaagacatgtgtcccgccacctgccgtatgttccggctgtattccctgcacttcgacacttctctttccgtggaaagcaattccgcatagctgctgatagaagcaagcggcgcacgcaagtcatgggttacggccagcatgattttctttcttgcctcaatcagttcctcgttttcaagaacggtctgctccaactgacggactgtgccttccagcctttttttataacggtttatacgcatcatatcccggtgtatcaccatataggaccatatcagcagcaaaaccatgaatgccgtcagaccgatgaccgtggcaaatgaccgtttcccggcttccgcaacttcttcttcctgtctcttcaagtccgcttgtaccgttccatccatattctcaatcatctgccgcaactgcacattcagccttctgttcatcccatccaagctgtccgtccgttctgccagcttccgggcatacgcctgctgtctgccaaccacgctccgattaagctcatgaagcatggaggcggcagaaggagaatccgccctgtggcgttttgcgaacaacctcttcaggaatcccccttttggggcattttcccgttcactctgtctggcaatggccggaatcttcgctgcaatttcccggtcggcttcctcctgcctgtgtacccaatatatgatttcccgcatataccgctccttggctctccacaaattacggatgctgtctgtatgtgagccggaagaggagtacctcaagctacacaacaggctgtcaatgtgccgtctccgtttctgaaatgataaaaaatcctgctcactccactccataaaggtttcacagaagaaagaaagcctgagcattttcacgtatatatcatttatctcatgctttttccggttaatcatccgtacttccatttccctagccttagtctctttccattcgcagatgccaacgtaagcaataccacttatgactacaatcttggccatatatcctaccgctattttggcaagaagcggttgcaggcgcaaagatttcaacaatttattcctactttccaattattcactttttaattcattatattctattaaaattctttgcaaaataaaccgaccagtcggtttattttgcaaagataagccttttccaagaataatgaaaaaaaacaggttccagcaagtaaagttttatcatttatcagtctaaaagacaacggaatgaactgaaagggaggaaaaggaaaggaatgcgggcttaaatttctgagaacatccccaagaaagtcttaccaatagaagtgttcaatgcctgtctgctgaacgccttggcatccttcaaacttattttatgaccataagccacattggaaagaaagtcctgttcccggacaagaagttgctgatacatttgtggaaattcgtccatatattcatgggcggaggaaacaaactgcatataacatatcaggagattgccattcagatgttcgggaaaactgtttatcacccgttctatcggatttctgtattgccttaaaaactcattccaatccttgtcagccaaagaatacatttcacaagaaatctgcgagtcggggaaaaaacgcattctgacaaccgcatcaatcagtttctttttggaaggaaagtagtgtatgacagcccctttggatttatgcacggcaacagccacatcacagaatgaggtctgcttcattccttttgtgatgaataacctgtatgcctcctctataatccgctgtttcaaattcgggtccatcctactgcctatattataaaaaaatagcacagacgcaatcaacatccaaacatggtagtggaatacctagagacgaagtgacgcacctgtgctatatattttaatatagcgcaagctgtcatattccatcttgtctctttgaaattttccacttttcgtttggaagatgatatatgatactatactatgtcgttttaacagcgcaaaaatacgttatttatcgtttatttccaaatttatacgacacttaatagcactgttccataagaaaagcgtccgctttcagggacaagcagcagtattttttcaccggatttgagtttacgggtagaacagaactcatccaaggcagccagtattgctgacgatccgatatttcccacccaggtaagattggtaaaccactctcgtttgtacaattcaaaactctcgtttttcatcgcttcaatgagattaccataaataaccattgacgaagagtgaggtattacataatccacatcgtcaggagtcatgccatgtttattcagacatgatttaatatgtctaatccataacggcatcaacttcgtccctaaaagtttaatgtcctgtttaataaccataagggactcatcgaccaattcctgactttcaaaagatttccagcttttcagttcaccgtcctccctccggacagctccggcaaacatacaggtaggggtttcattggcatatgaatccatttctatccattcaatctttaaagatacgcccttttctcccggatgattttccaataatgcacaactcgcaccatcgcttaacataaagcgcaggaagtccttttccaaagccatatatggattggtgcccaaattgcagcatctttcatattcgatatcgaagtttttggataaaagcattgctgacaccaattcagatgtgctgcatattgcattctgtttttctgatgcagctatgctcaaataagctattttcagcgcttgcagacaagacagacaaactccagcagaagagaatatttcaacaggttcttcccaaagcccatgtaccatagacgcatgagaaggcagaatctgatcaggggtcgcagtagcacaagcaagcaactcaatgtccttttggctcttattggtcaatgccagcaacttacgtatagccagcatcgccatttctgcatttgtatgtgtgatttcttgatttttgtttaaggcatagtatcgccgtttaattccattttgctttaaaactatccgttgcactttggaatgttttccagaaatgagtcccaagaactcttccatttcatcattggaaacaggagagttcggaaagaagcttgcaagcccagtaataaaaacatctttcttcattagttcaatttttaattagttcatattgattataaagaactactttcagttcttctattcgcaatccattcaccaatgcatcctgaaaacattttccaaacagcaggattcgaaatgtcaaagccaatgtagaaggattaacatcggatcttatttcttttgtttcaacagccttcacaaatattctttcccataatttaatctccttatttgttatttcgttgaaagcctcgttaaatcccggatagaaatattctgcctgcaaaatcaagttaagatatgcacgtgtaatattggtcttctctttttctatgagatagatcctcattgcattcatcgtttcctccaccttctttatgtaataatcaataaattcaagcagagaggtgtgagaaatgtccttgaacttatttttggcatcttgtttgtgaaaaatgtaaaaatcaatcacatcaataaacagttcttgcttgcttggataatgatatgacatacatcctcttgataaattcagacttttttctatctccttcaggggaaccgtgttgtaatcttttgtcagaaactgtttgtatgcagcttccctgattaatctttttgtttctgagccttttactcctttcataaccttgttttttagtatcatacaaaagtaggtcttttgagtgaaaacacgttcatttttagtataattaaatatgtcctacccaattaccattaaatcatttatgaccatacataccagtttatgaaataaatgccaacgatgcctttttcttttttttcttatacatatattattttttgcttatatttgtcttcaaataagccgattagtcggtttgttcggcatagaggaacccaaacagaaagtggaatttcaaaacagagatgttcctctatgtctttgttattccatcttctggcaaccggattctatccctgttccaccatatccctaaaaaataccgaccggatggtattttttacggcaaaagtataaatatataccataaaaacaaagggaaaggccaattatgcattctatcggcaaagaaatgcctatgaaatatacataatccgcttttccctatgagaaacattatgttaccggcttatcttgaaggcatcttcatcttaacctgcaccccctgtgagtttaaaacacgaaccggtgtcttttctccggctttcaaatagaacagaatataatccttcgcacgctgggactcgaagaaacctttttcgcgatattcggcaatccacctctgaatcatcggaatctgccaacggttcatcaaaatatagtagccgaaataatactccaaatcgctcaggaaaatattgagtttcaagtaatcccaccagaactgttctttctttttgcttttggcattgagtatgataacctgatgttcataagtgtcacgaggattttcccaatcctgttgcgaaacaaatacatcgggaaccacattatcggcatgatcctttgccggaataaagggaaataaggattctattgaatcctttatctttccatataaggacggttcgtactccttgttgtacagcataacatcccgcaaacgggtggaagtgagatgggttaccacggaacgtcctaccacacaatgatccggaacagtcattaccgatgccagacgtttcataaatctgacttctgcttttgcctgttcttccttatccggtctcttgaaaggataatctgaccaggcaatcttccgcatcccccaatgcaggtctgtaagttgcaaccccgcataagcacagaaaatggaagcacgaattatcttgaagataggggtacggtcaccctcgtgggccacgtaaggcaggtcttccacgccaaaaagcatttcattttccgctatcaaatcggcagagaccgtcttgccttcttccaagcgtcccttaatcttgaagttacgcttttggtatccccaagtgtgaacaggtcgcgtagctatcagtgccacacaataattgccgttttgcggcatgaaatctacattttgcggtgttgcattgagcatcaactcgttcagcaacttaatcttttggatatagtccataaatcaacaggttttaagtgaaacattttgttaacagtgcaaatgtaggcatcaagtttcgtaccggagttccgtttttcgccgaaaatcactgcagggtcaaccaattattcaatatttattctgttctcgattctcagtatatagtttgtttccgagaaaaagcgttccatacgtactgcctgaccggttctgaacaaaggtttttcactattggctatgtaggctttttttatgggaaaattccgtgcctcttcctgttgttcaaaataaccaatggtagaacgcaactgctgttcgccgtcttttatccattgattacccttgccttttctttgtttcaactctacaaatataatcgtatctctataaaacaggcagccgtcgcagcggttgtccatactcccgtccgccctgcgcagttcaatgcaatggtcaaccggtacgaaattcacctttacctgaggataattgtccactgccgcaatccaatcctgcccctgtctttctgcaatatatgctttttcagcggcaggagccggccggtcgcatataccgaatttgcgtctgtttgatgatgatatatgttgtgtcgggaagaagtcaatcataattcctgttgtatttccaataaatcggcaaaatcttcgtttgttctctccagcatcctgttgaggaagttctcatcggaaggaagcccatgatatgtgtccagtactgttactgtcccttcgacctcgttgaactcgtaaatagcgatttcgtcagggtgtatggcagcttctatgggataaatagcatttatcctttcttgtacctcacaggaaagattacctacagccaacagcataccggctttgacagcgacggtcaggctattaataaggtatgggctatgtgttgtaactaccaaacggtttgtttccaaagcattgttaaaagccagcaactgtttcattatcatccattgcgattccggataaaggttttgttccggttcttctacaatgttgacaaatgccgatttgttgaatctggcagaaacggctgaaagggcaatcctccgttgctcgtccgtaaggttcggtatgttccatatattcgcaacttccgcttcgaagcgtttcgcttcatcgctgctcatcttctgggcactattcgcctgactttttacagattcggacaaatgtaaagaaaccaaataaagcggtacgatggattggaatccgctggacgcttccatcaacttcaccttatagtcctcacctttgacataaacaatgtcattttgtttgttatattccagttgcgcatgattgataggcagttccagactactcttaatgcgttgtttggctttgtcatattccgtaagaaaacctagcaaggcatccggcaaatccttaatcagattcggtttgttgaccatgctgatgaaattccgttcggcaggaacgtacatgatttgaggaagggcatagctgtccaatgcattctcattcttttctatgacaagttcgccttgcttcgtgtaggtaaacttgtaggaatccccttcgtagaaaatctcagtctgttcctttatgaaataattggaaatacgatggtaaccgcaatacttgttcttgaacttggcggcggtaaattctttctccttgaaatcaccccgtgtcaagaccttctccatccatgtaaaggtggaaaccagtttggcaaccgtacttttaccgctaccctggttacccgtaaaaacggttactttctttatatctatccatccgtccgttacagatgctgtttctttcaacggaccgaagtttttaatcttgattctactcatatatttattgtatagacctgttacaaagatagtgtttctaaatgaaacgacctaatgaatgttgtgtttcatttgcagtgaacatagaggtcttcccaattctttgtttttccaatttttaacctgtatgttttatgatggttttctaatagtcagaagtgtcattctgatatccgaatgtgtatcagtcggcattgaacggacggatttcggaaagattttcattgccgctgtcaataaagcggtcgagcaccttaatcatgacaacaggtatattctgcttccatagtatctgtgcgtccagctctgtacaaaccaatgccatctgtttcaattctttttccaagtatgctcccgaactgatatattcattcagaagaggtttgttttcggataatttgattacagaggcatataacttgtattgttcattgatacatttcaaatgaaacttgtcctttagtgtggaaggcggatcaagtaatttcagtttgggcaggtctgacttgttgagaataatcacagtatttgtaaattcgactgtatgatctccaggcagactatacaacaatctgttgtcaggggatttgaacttatactcgttttcctttcgtaaattctgaggataagcattgtaccagttgaagtggaatccgatgattatctgtttgtcggtcaatcttaaagtctggaaggccttgtcaagattctccggaaaaaccctatattcacttttaggctgatactggaagcttcggagccagcagtttttgaaagagtatagtgtagcagcactgaaagactccttaaaattgacatatcctattgttttatccgtacagaatgcctctgccggcatcagctgacgtattcttccgacacaattgaacttgttacagcttttgtactcatcatcagttatgacagaaacttctgtaatccacttcatttctctgccaatactatctgatgctatttggtaaaaatcctgaatttcatcttcagacagctgttgagtaactttttgatgttgtattgttgaagtaagcgaattggaaagggactccagtgcattcttcagcttatgtttagccctgtatatgcacgactgatccaatggcagtattgttgtgatgtcttccagtggaatggaattctgctcaatctgtttcaggataatcggaacattttccagccattcgttcttttcggataaggattcaggaagagccggcagtgaataaaaatcctcgtaaacataggtgcggttaagtgttgccagacgtaacattaggatatacaagtatttctgtatccagccattgatgatgctattgttgcgtacgccagcctgaagaccaaaaaatggatatttttgctcgtatttgtacattgaatcgggactgaatgagagcaagtccatatacagtggaataatttcagccagtgaacttggaatcagtacataatgagggggttggctattagtgtaatacaatatttgatttaaaagttcatattcttttctatataacaaaagtccacctaatgcgatatgaaactccttaaattctttccgttctttctgcctaagctctaccatttggctgtttgcaacagtttgtccagatgaagtgtagggaacgtttatacgttcatcaagttggaaagatgtaagatgaagaaacaagtgtgaatgggctgcaccccaatatttaagaatccattcgctgcgcttgtaaaacaattgctggttcaaacaagtccaaatcgtacggtaggtattctgatgcattatggtgaactgaaaatcatccagcattgcattgactatatcatttccgttcttgatggaaaccgcttccttttgttgcatgcacagctgctcattaatggagacaatgccttcgtataactccggcggatattccattaacgtccattgtttacctgcacgtaaagatatgatccagtcatacaattcctgatagcaatcgcgcaatacatccacattgttctgtttgagcatggcaataaaaagttcgaaccacgcttttctggtatcttgtgggatattgtttctttttatcaaatgcttttgcagcttttcaggtacattatagatatagataagcctgaaaatcataaatatactgaatgttagcagtacacagaatattgtcgcgagaataatggcagaataatctatgtactttgtaagaactccgaaatcaaaatagttaggtggagcgaccaattgatagaacagtaaaaatatggtaatagcgagcaagccaagaaaatgctttgtgcttctttcgttcataaagagttgtatcaggcgggtagattcatacttatcgtctatccgctgaataactccaattaacaagggaacggcaatgcccagtatggctgccgttataggtataataatttctttagaaaaaatgtccataatataaaaaatgttcaatagttgctatggtactggaggaaactttatgcgtccttctttatcgatggtacaagataaggcttccccttgaatttttttagctatacggttataatttgttgctgttcgtgtttttaaatctaccatttctttccaatcaaaggtatgctctatattaaaaacattctgttcatttgctgaagtaaatcgcatggatgattttacatggatattaccctcttgagaccggacattccagttaaatctgggatgatattgtaattttgcagcgaggcataatctttcgactgttgcctgaattatacctatagtcgtgtttaaatctttcagactttgggagtaataccatttgaattcatcatagatttggtaatccaagggattctcaaaaggttggaacaactggtaaattttgctcaaaaatgatgaatcatagtcatgtaaaaatgccggaacctcctgatccattaaaacacggcagcctttggccccagcctgttccaatttgacagccttacttacagcatttcctagcaacatttgtcccaaattagtgttgttatcttcaatgatatctccgtatgcaataccaccacgacatagaataccattttgcaaacaatcccacataatagtatgacatgaaagtatgacatctttcatgttttcagaccagacgaaagcgcaatcggacaactgggtgaaatttactgtagggtatttactctggcagtttgccaagattttccgaaaaatgatcaaaatattggctgcaaattcctgattccctgaagtctgaaaatgtttagagacctgccaaatattaaaatcgtcttctgtaagctggattttaccttgtgttaaagctgaaaatcctagtatatccacatagaagacaaaaccttttagattattcatgttcataatgttatcgtttataactggttgaattttttttggacattttgagctatactgatgaaacagttgggaattgtaacatattagttgttgcttgtcacaaagatagtatatctaagtgagatgagttaatgggggctttgttttatttttgattttgccaataaatggtatttcctaaaataattttgtatagttcttcatttttattgtaaaacaagttatattcttctttatgtttccatcttgaggctgttttgatgactttaatgagtttattattatcataaaagtattctatagttgaactatcaccataaatattaactccaacatatattgaattctcattatttactatttcaaattttgatatagatattaaattaattacgggtgtattttcattttctgttgggtaatatttgaaataggttttgttatatccatgtttagaatattcatataaactgatatataaaccttttcgtatatctgcatctatatgttgctctgaaataatcattttgttattttcatcgaagccaaatctgaacaagtcctgataattccatttttcaatggtcatgttttttaaaagtctaccttttttttctttattaagtaaatgataataaggtagtagattataatattccttggtcgaatattcccatctatgtacattttttaaatattcttttataagaagaatattattctttttttgtaaacttgttatttttaattttaaatctgttaacataattgtcgatatttaatataaattacttatgaattaatgggttgaattgttccatcttccactttctatttctgttccaattttttgtaattgttttctgacataattgtcttttaaattatcgcttaatttattgtctatcgcatatttctcagcactctctaataattcacatattcgtttatcactttcaagcgaatgtatgtaccctgcatggtaagtaccagtagttctggcagcttctcttcctggatgtccagattgagttacttgagaattagcagtaccccatagagcaactccattttcggcatcattaattcctatgtgacacctttccaatacggctttggatctgtttacatattcattattccgattcaattgaacaatatgatgtggagtctgtccagcagcaacaggcctataggcattttccatagctttttttaatttataagcatgagataagcctaaaatatcaagtgctatgttagtagaattaacatatctatatattgctaaaataccagattttaatcctataggatcttgactcatgtaactaccaattcttggttcataatacctaaaacggttgtagtataatcccgattcctcatccacatattgcccttgaaacctgaatggacaatcaaactccattcctttatttacagtaatcacttttccataaatatctagtgtacaatcccaagttttgtttcctttttcatcgtacatctgaataggtgtacccaaataatcggacacaatagaatattgcttaccatcctgtatctttgctgttggtacaaacgtgcctgcttcgaacacccaggtggtaacatcttctgccggttcttttggaaggatgttttcctcttcgtccgattgtaagccaacggctttatagctccattcgtgtaaaggtacgtttccgtcccacacccagcgtgtgacctttccgaaatactgtttggcggtgcgtcttcccaacgcatcgtaacggaactccaccggtcttccgtccggacgtataaccttctttagcataccattggaactccactcgtagagccatcccgtacctgtagccagacagcggacgccgcgctccttctccatgcgcttgcggtcataccttacgcccgtttcctgcaaccgtttgaactcacggaaaatgaggtttccttcgtcgtcgtagtgatagaaacaatccgggtcttccaacagttttcccccgggaccgtatttgcggtcttttttgtccggtgtctcaaagaggttgcccacgaagtccggtacgcggtaaatcacgtccgtttccgagccctggatggtttcctgccggataaggaagtcgaaacggtcgtagtcgtagcgcatgaccgttcccgtcagctcgttctccttggcgagcaaccgattagcgacgccccactcgtagcggtacgccccgcgctcgatgccgcccgcgcggacggacttgcgcacctcgcgcccgaaacagtcgcgctcggtgctgacggttacgccaccggagaaggtgcgctgcacctccagccccgtattgtcacgcacccacgatgcctgccagctctcgcctgcctgcatggtctgcaggttgccttcccggtcataagtgtgacgaatgtccgctcccagactgctggtgatgcgggtgcagttgccttcgctgtcataggtacggctgacggtgtattctccctgcctttcctctgtaaccagtcccgtcttcctgtcacgggtgaattccagcaggttctcgctgtgtttcgccctgacgagcatgccgtccttgtcatacgtgtagagggagacctccccgtcatactgttcctccttcaggatattgtccagtccgtcgtactggtattccgtccattttcctccgggacggttcacacgggtgacacgacccgcgccgtcgcgctcgtactcacgccgcagaccgtcgaagccggtttccgtaacgacctgtcccagcccgtccagctcgaagaaatagttgtcgcccacctcattgccgatgcgccggagctgcaactcgctgttgtagccgaatgtaatccagtgcctgtcctgctcgcggcttttcaacacccccagcgccccataggtgaacctgacctcgcggatgttgtcgctggcatgtaccatgtttcccatggcatcgtactcaaaccggtgcacgttgccgtccggttcttccagccgtatcaggttgtccgcccgattgtaggcataacgggtaacattgcctttcacatccaccgcctgcacaagccttcccctgccgtcgtactcccaccggcggaacagcccgttggggaactgcagcagctccaggtcgtacctgtcgttgaacgtgagcgtgtaaacccggccctgtccgtccgttatggtacgcaacacgcctccctcgtagacatatttcacagtttctccacccggtgtggtccggctgacgacccgatcctgtccgtcatagtcccatgaaagcctctttccgcacggagtgtagagcgagaccaggttgcggttgttgtcatagtccaggaaggtgtcctccccgttctcgtccgttatccggaccggcagtccgaactcgttgtaggaagtcttgcgggtatagccttcggggttgaccgttacctccagctcctgaaagctgttgtactggcggcgggtaattcccccgttggcatccactatcttgtagatgagtttgtcctcaccgtaataatattcggtttcggcattttccccattgcggatatgggtatatcccttaccgtaacggatgaaatattccatcacgcctccatcgccccatgtatgcacacagcgggcattctcacccttaccctcgtattcccaatggaaggacatacccccttggttggtaagctgtaccagcaggtgcccgccggaatagacgaaatgcttgctgacatccagcgcgtcaatggtttccaccatgtcgccccggtcatcgtaacggtagcggaccagcttcacctcctcaccgtcctgatttacggaaacgcagagcacccgccccgactcgtcggtttccactttcaggaattctccccgtgaggatatgattcctgccagccttccccccgaagcgtattcgaagcggagccggaatccgtccttcgtggaaatgcccgataccatgcggtaaccggagcggttttcgggaccgtcaaaacggtattgcaacccccggatgtccgtaagcatgtaaccccggccatcgagtgtccatgccagctgttccctgcggtcaaaatgggattctccaagtttcagcgcaggcaggaaggactcccgtccgtcagcatgacggaatgcgaacgccccttcctccaactgccgtattcccagattgtagctgtggtgccaattgtatcccaacggaccgtccacggcggcatcactgtaataggtacgttcccatacgacgggaatcggacccggaagctcgaagtccacattggtgtgatagaccctgcccgtagcagcgtccaccggctcaccgaatatgatgcaagctgttttcttgagaatcctggcaagccggggattcaatcccgccttgtctatcaatccatgcagcagatgggatatttttttcccgagctttgacaatcctttcagccccagcttcatcgccagcgcaaacacatcaatggtaggcggtcctcccacaagcacgggatttcctacggatgtgatggtggagagcatggaagtgggggcaagcagggccttgctcaccttcctgggcttccccttgcggggaatcgtcggtattcccacaatgttgcatgagagtgccggatgtgtgagggaggaacagggcgcaccgtccgccaggacagtggaactgcccatccacatctcggactcggacataccgctgaccaacggggccggatgcaatacaaatgccggcagatgcacgatgccgatacctgcctgcgcaatccactggttatgcaccttgaccgacggagccatgctcttgaggatgttgcacgccactccggccactccatcagccgcaggcggcatggcagccgccatgccggccatgaggtctgccatgaggtcgtacaccttgcctacatgaggcacaggcatgatgggagagggaggggtaacggtaggatgcatgtctatcccgatggacaggtcgccgaacttggcgacaggcatacccggcatggaaggaaggattccgcccagacccgcctgaatctcgtccaaagccgccttggaggctgaaaaaaggtcggcaaagccccgtctgacgctgctgctaccggcggcgtcagctatattcttgaacacatccggcataatgaaactttttgattcttgtttttaaaccgattggtcggtctgctttttgcaaatgtatcatttaaaatcaaaaaagaaaaacattctcctactattttctatcaaaaatcataagacaatccataaaaggcaattgatttcaagtcatgtatcaaaaaaacgtcgtatatttgcatctgttgaagaaaaaaggagagtaaatggactttgaaggagaatataccatacggacggcttccaaccagcagacatacgagccgaataccgtatatccggacgcagtgctaaatatagcccgcgaatcggcttccgtgttccaactgaagcggaaatgggaaaaaactcctccgatgctgaatctgacccctgattttcaacggggactggtatggaagaccaaacagaaaagcgagctgatagaatccatactgatgggtattcctctacctctgatttatgtgaaggaagatgagaagggagtgtatcttattgtagacggcaagcagcgtctgagcaccttgttcagttttatcaacaatgaatttgccttggacaaactcactatcctaaaggacaagaacggttcccgattcgcagatttgactccgttggagcagaataaaatagaggactgttcgcttaccttgcatgtgattaaggcacctaccagtgaccgggttacctttgacttgtttgaccgggtgaaccgtggcgggacgcggcttaacaatcaagagatgcgcaatgcgctctatcagggcaatgccacgaaactgatcaaccggctggccaagaaagaggtattcgttgaagctacagaaggttccattccagacaaccatatgaaagacaggtatctggtactccgttttacggctttttatttgtggcagcagcatatcaccatagacccggacacccatgagcctctggattaccgaagcaatgtagaggattttttggggaaaacgatgcgttttctcaatcagctggagccggaaaacggtttgtttaaagaactggatagccggtttacacgtgccatggagcttgccatacaactgcttccgtcaggcggcttcaggctgccttcgttacccggcaagaaacggccgataaacatggctttctttgagagtttcagttatcttctgtcaagattgaacggagaaggggaacaattccatcgtcaggttcaggatacttatatgcaattaatgtgcaatgatgcctatctggattctctcacacgctccgtggatagcggaaagcagacctataagcgttatgaaattatcaaccgacttattcatgaactgaatttatgctaaacaatctgactgtcaacaattataaatgcctggtggaatgttcgttggaattaaaacctctgaacctgttcgcaggtccgaattcatcgggaaaatctaccgccctgcaagccttgctgattgcttcggataacgtgacggagcaaaaaggcaaacacggtctgaagaaccggagaacagaagcgtcgaatttcaatgatgtaaggaactttgtgaccaatgccaagtcatacgaaatctgtatttcgtatcatggagaagatccgacccggctttgttttactccgggcgatgactcattccaaaccacttttgtggaacaatcggctgacgcatctccgaacctgctgggagttctcggaagcgagaacctgctgtacctgcctgccacacgccccggtggggcatatatgcatcccgttaatcccgattcggaaaacaagctggggcgtaacggggaatttgtgatagactattacgccaagcaccgtctggatacgctggatgccgcattgatcctggctcccggcactcaaaccctggaaggtcaggtgaattatcaactggacaggctgaccggttaccggctggtggtggaaacagtaggaagcaatcattacgtaaaatatgaaacgcgcagcggcaaacagcttctcccttaccatgtcggtaccggagtaagctttatgacggaagtcatcatagcttgtttcgcgaccccgaaaggcggcatggtgattacggagaatccagaaatccatctgcaccccaaggcacaagccgacctgattgatttcatggcaaagatagcgaaagccggtgtgcaaatcatcatagagagccatagcgaccacctgtttaacggtatccggcgcctgatcagtcaggaaaagttggccttgtctgacgttgccgtgtacaacttcagacaagacgggaatggattgacccatgccgaacctgtggaatttaccccacagggaggaatccaatcctatattcccggcatgtttgagcagtttgatattgatttggatgccattttaaagctataagactctatggacggtatcattatcaatgaattgtcattgaacggacagtttttggacagccgggatttctggaaaaacggaatgcctccgtttcacaaggcattgcaggatgccctttcacatggagtgggatatctgttcaaacaaggaagtttttttgctgcgcaagccactcccgacaagactttacacgatttgctgacagcaccggaaacccgtatcatcgatgaagccaggctgtataaaagtacattggcacgtgccatctgtaatccgttttgggatgaagctccccaacaggattccaatgcccaatattcagtaggtgaaaccgatgtatccggcagttcagttgccgaagcagcagcccgctcggtttgtcttctatcatttattagatccaggtatgagaagcatctggttgccgtaaccaaagatgaagaaccaatcgaggttggtaatatctggaaagagaagcaattgtactctatcttgtttgaaaggggtgaactatctctcgaaaagtatattaccattcgtttcagtggaggcaagcttgatttcagccttattgatgacacgctgggtttttcccttattgacggcgagaatcagaacgaatttattgattcattccataaatttgaggagttggactggagtgccattgctacagataatggattggattataaaccgtataacaagaacaagaaaagcaagcgctatttttcggatgacctatggaagaaaggcattaaaaagttcagaatcactcagcggaacaggtgtttcggctatgtggagaatggtgttttttatgtgttgaggtttgatttggaccatgagctaagcgatgttggataatgtttatagccccttggccttatttttataaaaatagaaagctgtgcaaatttataagattggcatcttgcttatctccatatactttcagtcggaaattcaagaattacaaatcctaatacttataaccggcggatttataatccgccgggacgggtcttgtaacttaacaataaaggtagtgttccaataattaatatgtaatacatttgttttgatactacctgctattgtactaaaaaattaagaatactcccaatatgcaacaaaaagattttcaatattttcattttctattttaccatatacatatatacttccactcataaattctgagatgcctctcattccaatttcgttgatttgaaaaatgaaatcatatccatcttttgttacttttccatcattatccaatccccattgtattggtatagcttttcctccaaatttgataacattatttttttctggcccatctctgtcttctcctatttcatataaggaataaatatcatcaatttcgggatgtttaaatttagtacaattactctgttcgcttatttcatgttcaattagtaatactttgcaattaggatatgaattgtattctaaggaagtatcaaaatctggagtaaaaatagagtattgtctttctttatttaatgggctttgcagggttaagtagaaataatatttttccatattagggaaagaaatattatctaatattttaggagcattacccccaacccaactattacagttttctttatattcacatatatcataatataaagcgtcttctctagtctttaatatcttttttatgttcataactattttatgatttacatgttattaaattatttgctttagcatgtgctattgcatcctgtctgagtttctcgactaatgcggttgctttttctttcgcagtttttctatccatgccatcagctattaacccttccattattcctctacgtgttaaagctgcatttttgtttatattttctagtgcagattgtcctttcaagtttttacctttcatcccatatctattttgaagagcggtaattctattgtgtatacccttttctcttaatgcaatagaagggttttctttagaaattaaatcaactcctctatttttacttgtgggaagtttattgttctgttcaagccatgcgtgttgaaggagttcgtgtgctgttaaattgtcaccaatattcgccctactgctaatattgccataagtatcgatgtcaaattctttggctacaagtccaaaaatatcaatacaaagattgacatttttgacatagctataaaatctttcacctgcacttagtccaatagggtcttgacttatataattaccaatttctggttcgtagtacctaaagcggttgtagcataatttagtttctttatccacatactgcccttgatagcggaaaggacaatcaaattctgttcccttatcaatggcaagcacttttccatagatatccagtgtacagtcccatgtcttgtttccttgttcgtcgtacatttggatgggggtacccaagtagtcggacacaatggaatattgtttaccttcttgtatcttagctgtaggaacaaaagttccttcttcaaatacccaagtggtaatgttttcaatcggctctttctgaaaggattctcctttttcatctggttgtatttctgtagttttgtatctccattcatgtataggcacgtttccatcccatatccaacgtgtgaccttcccgaagtattgctttgccgtgcggcgccccaacgcatcataccggaattccaccggccttccgtccggacgtatgaccttcttcagcatgccgttggaagcccattcgtaaagccatcccgttcccgttgccagaaaatggataccccgttccttctccatacgtttgcggtcgaaccttacacccgtttcctgcaaatgcttgaactctctgaaaatgaggttcccctcatcatcgtagtgatagaaacaatccgggtcttccaaaagttttcccccggcaccgtatttgcggtctttcttatccggtgtctcaaagaggttacccacgaagtccggcacacggtaaatcacatccgtttccgaaccttgggtggtttcctgccggataaggaagtcgaaacggtcatagtcgtagcgaatgaccgttcccgtcagctcgttttccttggagagcaggcggttggcgattccccattggtagcggtaagcccctttctctatgccgcctgaccgtaccgacttgcgtatctccctgccgaaacagtcgcgttccgtcttgacagtcacaccgccggagaaacttcgctgcacctccagcccggtattgtcacgtacccaggatgcctgccagctttcacctgcctgcatggtctgcaggttgccttcccggtcataggtatggcggatgtccgctcccagactgctggtgatgcgggtgcagttgccttcgctgtcataggtgcggctgacagtgtattctccctgcctttcctctgtaaccagtcccgtcttcctgtcacgggtgaactccagcaggttctcgctgttcttcgccttgacgagcatgccgtccttgtcatacgtgtagagggagacttccccgtcatactgttcctccttcaggatattgtccagtccatcatactggtattccgtccattttcctccgggacggttcacacgggtgacacgacccgccccgtcgcgctcgtactcacgccgcagaccgtcgaagccggtttccgcaacgacctgtcccagcccgtccagctcgaagaaatagttgtcgcccgcctcgttgccgatgcgccggagctgcaactcgctgttgtagccgaaggtgatgtggtgccgttcctgctcgcggcttttcagtacccccagtgccccataggtgaacctgacctcgcggatgttgtcgctggcatgtaccatgttccccatggcatcgtactcaaaccggtgcacgttgccgtccggctcttccagccgtatcaggttgtccgcacggtcgtaggcataacgggtaacattgcctttcacatccaccgcctgtacaagccttcccctgccgtcgtactcccaccggcggaacagtccgttggggaactgcatcagttccagatcgtacctgtcgttgaacgtgagcgtgtaaacccgtccctgcccgtccgttatggtgcgcagcacgcctccctcgtaggcatatttcacagtctctccgcccggtgtggtccggctgacgacccgatcctgtccgtcatagtcccatgaaagcctttttccacccggagtgtagagcgagacgaggttgcgattgccgtcgtagtccaggaaggtgtcctccccgttctcgtccgtaatccggaccggctggccgaactcgttgtaggcagtcttacgggtatagccttcgggattgaccgtgacctccaactcctgaaagctgttgtattggtgacgggtaattcctccgttggcatccactatcttgtagatgagtttgtcctcaccgtaataatattcggtttcggcattttccccgttacgaatatgggtatatcccttgccgtaacggatgaaatattccatcacgcctccatcgccccatgtatgcacacagcgggcattctcacccttaccctcgtattcccaatggaaggacatacccccttggttggtaagctgtaccagcaggtgtccgccggaatagacgaaatgtttgctgacatccagcgcgtcaatggtttccaccatgtcgccccggtcatcgtaacggtagcggaccagcttcacctcctcaccgtcctgatttacggaaacgcagagcacccgccccgactcgtcggtttccactttcaggaattctccccgtgaggatatgattcctgccagccttccccccgaagcgtattcgaagcggagccggaatccgtccttcgtggaaatgcccgataccatgcggtaaccggagcggttttcaggaccgtcaaaacggtattgcaacccccggatgtccgtaagcaggtaaccccggccatcgagtgtccaagacaactgttccttgcggtcaaaataggaatctccgggtttcagtacgggcaggaaagactcccgtccgtcagcatggcggaatgcgaacgccccttcctccagctgccgtattcccagattgtagctgtggtgccagttgtatcccaacggaccgtccacggcggcatcactgtaataggtacgttcccatacgacgggaatcggccccggaagctcaaagtccacattggtgtgatagaccctgcccgtagcagcgtccaccggctcgccgaaagtcttgcacttgatgggctggagaatgtccgccagcctgttcatgccttttttcctcagcctgtcgattaggttttggaagcggtcgcctatcttcttccacatcttgcccaagcctttcagtccgaacttcatcgccagcgcaaatacatcaatggtaggcggtcctcccacaagcacgggatttcctacggatgtgatggtggagagcatggaagtgggggcaagcagggccttgctcaccttcctgggcttccccttgcggggaatcgtcggtattcccacaatgttgcatgagagtgccggatgtgtgagggaggaacagggcgcaccgtccgccaggacagtggaactgcccatccacatctcggactcggacataccgctgaccaacggggccggatgcaatacaaatgccggcagatgcacgatgccgatacctgcctgcgcaatccactggttatgcaccttgaccgacggagccatgctcttgaggatgttgcacgccactccggccactccatcagccgcaggcggcatggcagccgccatgccggccatgaggtctgccatgaggtcgtacaccttgcctacatgaggcacaggcatgatgggagagggaggggtaacggtaggatgcatgtctatcccgatggacaggtcgccgaacttggcgacaggcatacccggcatggaaggaaggattccgcccagacccgcctgaatctcgtccaaagccgccttggaggctgaaaaaaggtcggcaaagccccgtctgacgctgctgctaccggcggcgtcagctatattcttgaacacatctgacatggtgagaattttttagaatgtgaaaaagagacaaccgggtgttccaaccggcacactccggctgtccctgtaaggacttacctatgcatcctgtgcatagtcgctgttccagtcgttctcgtcatccccttttgtaccttccaacttgatgacaaaactctttgccgggaaataaggagtcaggtgaatgtcgaggaaaatacggtctttctgcttcggatcgcgctcgaaacgaagaatcttgaatttctcaatcaagcgtccgggaccctgtatgctatccaaaaacttgctgatctgaccacgcaaatccctttccgccttgctgttccagttctcaaaggcacggcggttgaggaaatccatcagcactttcgttacccaatcgaacacacggactacggaataggtctgcaatcccaagttgtccccgttgaacaatgtcttggcagagaaagccatcaccttgccgtattccttcaccatcggaatcaggccaatcttctcgatttcggaaatctcgctttttttcaggttgaaagcaaccccgtccacctcgctcatggaaccatacttcttaccggcggtaacctgtgccattaccgtcttgtacacactgccggccaatgccgcagaaggaggaatcagcaagtcttcggtttcgcccagttccgcatagcgtccccgtcctaccagatagttgcaggtcatacatacgttggacttgtacacatcgcctcccgaaagattggaatcaaagaacatttcaatgacatcatccggtttttccagatcagcgaaatccgtgtaaatcatcaccttgttgtcatgcgcaatctttgcccatttttcaacaaccttgttggaacccaaatatcccgggataaccagcagggaatagttggtacgcaagtccaaacggtcataattcgcacgaagctcgttagcaatggcatcgataaagaaggagttgtccaaatcggtaagctggctcatcgaagcgttcacaatggagatattcttgatcttgtcggaatccgtattcttgtagaagagcatgaccgtgcggtaggacttctccaactgcctgacctcttccaccgctttcagctggttctgggatagcagaccggacaccgccgcagacttcttctggcacagttccaccatctcgctgatggatttgttgcctttcaacatatcgacccacatctcaagccgtttttccagttccttgcgctcagccgcccgttcggggtcggaaaggaatatgttccgccgtgccttgcgctccggattcatgttctgtatgccgtccacggaagattccaagacattgaaaccgccaaacttagccagaatctgcaattcagcgttcagatttctggactgcgccacagcctgttgctgctgtacggctgcttctctttgtgtattctgttcgctcataactatcattcattagtggggttagacttctcattgttcttcaaatcgtccaaaatggcagaaatcgcattgacaaacgctccacgtgtctccggattttccagcacccgttgcagcaccttgttggaacgcaacgacttctccatcctgtccgcaaactgcttttccgcattcaggccggacaagaatgaactctgttccgtcattttcctgacagaaaaatcaccgacattgtggaaacggaaattttcctctacgggagcaccgtccgcatccgcgaactcgatatctatttccggccggaaatgtgcaaagacttcgtcaatgttggtcagaccggcaaccacttcgggagccaccggctcatccttcgtcagctgttccaccaataaggttcgattttgtggaatttccgcaataccttcggaagcgtcaatcttcacttcgtttccgccgattccataattaccaagatccatacttattcaattttaaatttaaaatatatattaattaaatctcgctcaactgaaaaaacttccccttcttctggccttcgcctgctgcatatccggattgtccaccagttccttccaatcctccccaatccattcgcagagctgccgttccaatatcccgacatcaatcggagcacgaaccagccttcctgtatgaagagccagatacgccgcataaacgaacgtggaactccgcctgatttcggcagaaaggtagctgcctcctgccagggcaagcaaaaaatattcgaaagcctgttccatctttccatcctcatagcgcaggaaaccacacatgcgatagccttccatgacataataagggtccttttgcatgacggcttttttagccatcatgtcatacaaggcaaccgcttcctcccgttttttcccggctgtcagaatggccgctttcatggaaacagccattttccaataactatatcctgccgtttcaccgccctgcatcgccttttccgcctcccggacggtttcgtcgctgtatttcatgctatgcttatattccctgatagcataacatgcctcggatgcgataagcagagcggaaatccggatattcgtatcctttatttcctgtgcaatatccaacagttttcggatttctctgtccaataatttccaatcctgcttttgtgtagaatccatgacaaccgtaacctgctgcttgaaccgattttcaggtgcaatcaggtcgttaccgctatccgaccgtgccatccggttatgcaaagccgccgccatatcgaactgcgggcgtatgcaaaccacttcccgagactcacccagccggatactcctgttctttttcaagtcaatggttgtcatccggattccctgcgggacaccttctttcagcacattgccgaaccatcctgtccgggaataccccctttcctgttccggaggaaagtacagacagaaaaaggcatcatccaaccgggagatacatgccttgaaacgcaacatctctctccacaagttgcccgccgtatgctcaaccgacacatcaggaatgtattcttccttcagcagcccgtcgtgcctcagagccctgagaatatcatacttctcctcaaccttttctgaaaaccaacccgcatattcctgccagagctgttcagtgtattcctcgtcatcccccctgtacggcgtatcaaaacgaaagaatatgtcatcgaactgccctaccggagaacgttctatttccagaaacctgtccaccaagtccacatcattctgcccgacaatccatacagacagtttccagtccctgttgccgactatgtccgcccagtaatcgactgctttgtaatattcctgtatcacagatgcagatgctcccatagccaaccgaattatgagttaaactttactattcctcccgaaaccgttacgtttccctttccctctatcatcagatttacaccgttgaccgttccgttctttgcagcaacatcgtaatcctttgccgcctcctgtttgatattggtaccgctgctgctaattatactcttttcgctgctgagcaccatacattcgttgccggacagcaatgttacacttttcctgccttcgagagcaatggtatcggcctgcaagcctatcgacttatcatccattacgatgaccgattccgcctcgttggtaagggtaatgcttcttttcgccatgacggtaatggcatccgtgccatccaatatgatcagctgttttcccgtctggtcggtaataacgatgcttcccgtctcatcgtcgaaaacgatggcattgccgctgcgtgtgataatgctcttgaccttgttgtccttgtcccctcctttacctgaaccggaatggaacaccgatcccgtaacataggggcggtccgggttgccatgctcgtagcttaccataacctgatcgccgacttccggaacaaatacccatccgcgattcttggaaaccgcaccacttactcccgcattaggagtctgcaccctgatccaattggttgtcttgccgtttttctgccagtcgaaagccactttcacacgtccctgtcccttgtcgtcgttgttttccttcaccgtagccagttccggcaacgccaacggtcgcttcacatcgggaacaggaatatgtaccgtaccgtccggcacaccgacaaaactattggagtaatgtccgtcacggcgtacctcatgctcaatcccgacaatacggaacttgcctaaaggaggcagtttcatcctgtcagggaaagaaacatcgatgatttcaccaatccttatccggcaagtctttcctatgcctttgatgttcagaagattggcaccagacgcattctttacaatcctcatctgttcgtccagttccgccttgtccgttacatgggggtcggcagccgaggtcgtttttgcagtatatgccttctcagagcagctgtgtgcaatagactgaaggtcgttcatgccatccggtttggcaggcgtatccgcattatgctgtttgttctcctgcgctacataatcgtatcttgcggatttacccggtaccagattggcaaccagacgtacctcctccaaatccatgtcataaacaatcttctccgtattgtccctgtcaggcttgccgaaatacactttcgtcccgtcataatagaaccactccccataaagagccgaaaggcgattcataaagtcaaagacactctcgttatactgcgccatgtagggtatgggcgccgcatacttgggattggaaaccaaattgacctttccatactcctgcgtcacctcctttattatggtagagagggactgatccatccaagaatcgagtgtcctgttgttctcatacagtatcgtagggcttgttccgtgaatggccactccgcctgtctcgcccatgcttccaaccatttccacttgagtgatgattccctcgaagtcataactttcacccgtctgcctatggacaaatgaaatgctggctgtctccccgatgtagccgatgaatttttccggggtctgttggaacgtattgttaggcgacagataattcaccaccacagtgaaggtgtgatgccggttgaaaccctgacggagatgcagtgaaacgaatttctgttcttctcctttcacggttactttagtagccaccaaattcagaaaacttgctcccatactatcttaaactatgattttaaataaataatccgactggtcggtatgttttttggtgccgaaataaccggaattggtatattccggcaccttaaaactttgattaggaaacaaccattagttgttttccggccaatcctgtacaaatgtagcctcgtccatcttcacggtctgtgcagaaatggcgaacttgattgtcatcggataagggttagccacattcagtgcctcttcgtaatccaccacataaccattttcgaacaccaattccttcattttggcatcttcatccgctttcttgaagacgatgtttccgtttacgggctggtactgcttgaacatcttatccagcacaatggtatcgggagttgattcgatttccacatagattgtgccaccataaatgtcagatgccggacggcctttggggtccacatcacgattgaacttaactctccaggtcagtacatcaaactctcttgagtccgaaaacttaaatgacgctttaaatgccatattctcaaagttttaaattaaaaaataagttgattttgaaatatccggtcaaaggaggcctgctacagtcctatctttgtccttcaatttctgcgcccaatatatggcattttctgaaaactacaaagaacttttgatgattttttcttgtttttgccgaaaatatgcccataagcataaaaaaaacactgccaacaatagccgaattattttttttgccttatatttgcaatgttctcctgcgcaatttttaaatcttacgattatggaaacaggagttggtttcatcaatcttgatgattctgtaaaaattgcgcttaacatagcacttgcagtggctcgtgaaaatgcgaacgagtgttatacaccctcgcatttgttgaaggctctacttcataaagatgtagggttaagagattttataataagtataggcaaggatttaggctatctggaggaatgggcggacgtgtatatcgaacaatgcccgaaatccacccagttgtccgaaatcaagccttcggaacggattgacgccgttttccgtgccgcagacgatgcacgaatccagttcgggctgttcgacatcaatcccatctgtgtgctattggcactggcaaagcccggtgtcgctttttccagcgaccagctcaggtctttccccattctggaaaaggatatccattccatatatataggtaacgggcagccggcatgtccttctgccactacggagaagtcctatgccccgacttccgcctcatcctccttcttgggcaaatactgtgtggatctaaccgaagatgcggccaacaagctgcatccggtcatcaaccgcgaccgtgaaaaccgtatggtcatggagatactgggaagccggagcaagtccaatgtcctgattgtcggtgatgccggagtaggaaagacagcactggtttacggacttgcctgggagatagtcagccataaagtgccctcgtttctggaagaaacccgtgtatttgaactggacaacgcctccctgattgcgggagccacctacaagggggaaatcgaggaccgcctgaaaaacatcctgaaagaattgcggaatatcgacaatgcaatcctgtttattgacgaaatccatgtattgctggacaaccgacaaggaaataccggtgcgggaaatgtattgaaatccgaactgtcgcacggcgacctgaccgtcatcggcgccaccaccattgacgaataccgcaaaatcatcgagccggaccatgctttcagccgccgtttcgaggtcatacaggtaagcgaaccggacataaagtccgctatccagatgctacactccgtgcagaaacaatacgtggactaccatcatgtaagaatcagcaacgaagccgtagccgaatgtgtccgtcttgccaaacggtatatcaaagaccgccgtctgcctgattccgccatcggtctgctggacatgacgctctccgccatcaagatggtcaatgaaacaggaaagaagaatgtggagaccctgctatccgggctggatgaaatagaaaaggacgaaaaggaccttcaggaaaagaccgaagaactgaaaacgctgcttttcgtaatgcacaacaaattaagccccatccttttaggagtcatacccgatgaagcggatatccatgaattgcaggagtatgaagaactgaccggctatctgagaaacgcattgaacgtcctcctccaatttgcagagaagaaaatagaggaggtgggtatctatgaggtagccgccgttgtcgccagcaagacaggcatccctatcggcaagatacagtcgcaggaaaaggaacggctactcaatatggaagattatctgaggcgacgcgtcgtcggacaggaccaggccctgaagacattgacggatgccatcctggaatcccgtagcggcatgaacaagccgggacagcccatcggctccttcttcctgctgggacccaccggtaccggcaagaccgaacttgccaaagcactggcggaagccctgttcaatgacgagaaatccatgatccgtttcgacatgtccgagttcaaggaagaacactccgccgccctgctgtacggagcgcctccgggatatgtgggatatgaggaaggcggcatgctggtcaataaaatacggcaacagccatacgccgttgtcctttttgatgaaatagagaaagcgcacccgtccgtatatgacattttcctgcaaatcatggacgagggaaaactgcatgaccgtctgggcaaggaaggggatttctccaactccatcgtgctgttcacatccaatgtaggaagcgagtggctgaccaagcaacttgagtccggcaatgttccgtccaccacccagatcatggaggtgatggggcagtatttccgtccggagtttctggcacgcctgtctgaaatcgttccgttctcccccatccgcgaagacatactcctgaaaatattcgacatacagttcaacggagtcagaaaacttctggacaagcagggtatcggcataaccatcaccgatgatgcccgtaagatgcttgcacacaaaggattcacacccaaatacggtgcccgccaagtggccggtgtaatccgtaactatctgcgcagaccgatttcacggcttatcatcaacgaggagctgggcaaaggaaaaagtctggaggtaggtctggacgaacagaatgaattaacctggaatattcaccaataatcaagtacactatgtttggatataccgtattcttaaagataggcaacctggctgcctcctcactgaccgacatgtacaaggacagctaccagctcatcggttgcgaattcggatttgcccaagggatagatatcaaaggacaggcacagaccgaggtaaaaggcggcacgttttatgtaacctaccctcatcttcccaaccgtgacatgatccagtggatgctggatgcccgtaaataccagagcggagccatcgtagtccatgacaaccaaggctccacactcgaaaagatactctttgagaaagcgacctgtgtggatatggaaatcagctatatccggcagggcaaaagctatattgcgaccaaactgaccgtacaggcacagaaactggcattcggtacagaagagtttgaaaatcagtgggtgttttaaaaacagcagcgttatgggactttttaattttccgcaagtggacagcaacgtgaatgtcatattcagcgttgacggcgacgaatatgcagtggaacagttcaaaataggttttcaccagccagtagataacctaaagaaccaaccggaaggcgaagtgcgtggaggacgaatcatgataaccctttcgcagacggtgaaaagcaacatctacggatgggctgtgaaaccgtgggtgaaaaagaacggggcagttctgttcaagactggaacgtccggaatcgtgtttgaggtggcgtttacgaatgcatattgtgtcaatctgagacgggttatagaggctttgggacaaggattgtcaacaagtctgattctatctccagagagtgtaagcgtgaatggtattgaatttgataatcggtgggtaaagtaatgggcgatattctgaataatagaataataactctagaggattttgagtttctaaaatcaataggagttccatatacaggttatgtcaagggtattggatatacctgtcctgtgtatatgccagcacaggctttcaggattacagatggtaatgtgcaatggagcagttgtgagttacaccctcttttttatcaagctatagatgatagtccagagcgcatctttttgagcatgggatacactactgaagatataattgaaagaataacttatgataatggtaatggaaccataactgttgctgtgggaaaccggtctgtaacttttccaaaagaacaaggtaaggttaatgtgtatttgaatcaggaaggtggtaattattttatttatatagaagctacagattcaaaaggaaatattcttttgagtgattcaaaaacgattcgttcttatatacatgagaaaggaattaaacaagattttgacattacagatggagtgggctttaataaggaaattcttgataatattaatacaggaattggagcttttggtattgggttaggtgcgaaaactgaaataatagattatggaataagaagttttcatggttattcttggaagcagtttaattcactcgataaaaagcagcagttacttaaagaggctcaagcaattggaaaaaccgggactaaatatttaaaaggtatgaaaatgcttggaaactggagttcgtatgcttctgctggttattctgtttccttaatatttgtagaagatggaagaacattggaaaagaaatttgttaaagcagcattagatgtgggatttacctatataggtatattgggaccatggggatttgctattagttctatttactatttggtggatacagctacagatggctttggatattttaatgaataaagttatgcataaaatcttagaatatttgttttataaaattcaagtattgactcgatatatggacacaagtatgtatttaaatatacatgttccatttattatgtctacagtcttattattctatttggcagatattgcaattatatactattatattataatgggatattcaccacaaaaaaatccaagtaatgtgtttttggtggttttcattattatgattttattatggagtagtctctatttttattatcggtataaacatagaaatgaacgaattatggaaagaaaaatttatgaacatagttctaatgtatgggcatatcttttcatatttactccttttattgtattattaggatttgctttattttttagggtgtccagttctacgctctcgtttttggtattgatttaacaacttaagatattgattattaactataacactattgtttttaggtacaattttaacatacaaaaaagcatagctaattcattgaatcaatatattttaaagagatatgattatcagcactttggaacttgcatcatatcttttttgaactaaaagctggaacatcaaactggacaccctatttatttttttaatttcattgtttatgaaagagtataaggtattaataatttatacaatctccaatgatcaatcaaaaaagtcatttgaagaagaactggagagatacggtctggaacgggtcgggacgcaagatatctttgcccttcccttagaggaataccggacaaaggtacaggcattcaaagcctacctgcgagcctatgtacgcaagcatctggacagccaagacacggtactgttcgttgaatcacgcatgaacgaggaacggaccctgaccgccatgctgcaaaccaatctgatgagtgaagaagaataaaataacataaggatatgagtgcacaatcgtatatcaagttctggacagccgaaccctcggagcatgaagaagtgcaggcatacgacctgctgggctacgagtatgacttccggaaagaaaccactcctaacggaaaggtaaccgggaagacctacggcggtaaaatacgggtaagcattgccggatttcctacagaggaactcttggaatggatgttcaattcaagaatcctgaaggacggagaggtgatgaacacttccggcctgcccggtactcccaaagagatcatccgtttcaagggagcaaaatgccttgatttcaatgtgcattcaacaaccaaagagagccgtacctcactattcatccacttccgggaaatggagaccggcgattcgtgtcacttaaacttataatcatgaactggttcacttcattgttcagaaacaaaaaatcctcaatgccggatgaccgctacgtgatgcggctgtccgtctgccatgagacatacagcattgaagagttcgacctgcaattcaagcggaatacagaccgtgacggattgcctgaaggtgaggcatacggcggattcgtcacctgtaccctcagcgggatgccgggtgacgagctgttgagatgggccgcatacagccactcccatgaagacggcgaaatacggatctacctgaaggagcaacccgaccaacaagcggcatttgccttgcgctttgtggaagggaactgcatccgtctgcaacgcaaggttgaccgtatctccaattccagcagcatcgtccttctgtttgccgcaagaacactaaaattcatagacgaagaatttgaaaacgaatggcactgacaagtatggaaacaaagttttgcaaattgcccctggattttgaagccttgctcagcgaggatgtggaaaacagccgtcttgcatcctgctcggaaatcgagtccatcgaccagtttatcgaactgctgatcagtacggctcccggcgaacatgcctttgacaaggagttcggctgtgagatcttttttctcgactttgaaagcattgtctcacacacccgttgggaaggacaattctcggaatacataaccaaggcaattacccggcacgagaagcggcttacgggtgtaaatgtacgtgtcatcattgatgacaccacccgacaggacaatgtatttgatgctcccgccgtaaagaaacgtgtacaagtatatgtatatggaaccctggtacataccggagaaaaacggtgtttctattatgtaatctatttaggaccgatttcaacccgatgaaaggattatgagtacagaaaaatacaataaagagcaaatcagaaaccgtatgctgaaatacgctgcggctttctggggaataaaaaaggcggaaaacttcgacccggttgtcaagctcctgctggaagcattgtccaacgagatatatatgctgggagaggattttaccgccatcgagacaaggctgctggaaaagaccgcccgaatccttaccccggacatccttacctcaccctttcccgcacacggcatcgtacacgcctatcccatagaaccgtgttacctgataacccgggaatcgggcatgtattacgagagcgactcgcttacccggaagctatcgaccggaagcgtatcgttttatcccgcctgcgataccctgctgcacaaagccgacgtgaaatatatggtctgcgacgaccttctctaccggatagcccctaccttggagaagaccatgattgcccgtgcagagacaaggatgtctccgcgtaccgtctggttaggaatggcggtggatgaatccatttccgaccttgaagacttttcgttctatctagattttcccaaccttacggagagctatgaatatctgctcctgctcccctgtacggaatggtccgtagaagggaagacagtcgtgatggaagggggaatccatgaaaagacaaccatacagaaagaaccaacccgtgcctttttccaagactatgacgtaatgtccgtcatagacaaggaagtcatggatatttacagcaaacattttctgaaggtatcgcagtcctttccactcgacggttcctgcaggaaaaaccttccggacaccctgcggtcctgtttcaaagaggccgttctggagaagatgcaggacaagctggtatgggtgaagatacagttccccgcccatttcacaacggaagtccttgaagaacttcatgccggcatcaacatcgtgcctgtagagaacaagacgcttcacgaacagacgaccacccttgaggaaactttcagggtgatacccttgcgcacgggcagctacgaatcccttctgtccgtacacagcgtgaaggattctgacggaaagaactaccatgaactcctctattccgcaaaggattccacggaaagctatggaacctactccatccgcaaaggaggatgcgagcgtttcgactcccgttccgccaaggagctgctcggctatctgtccgacctgctggatgacgagacccatgccttcaatgccgtatcaagcatcaagctacaggcacttaccatccagatggagcagctgatggcgcaaatgaaacagacagcggacaacatgaacgagttcagggaaacaccttattaccttatgattgacgaattgtccggcaaggggcagattaccgtcaaatactggacaaccaactgtgaggtaggaaaccggatacaggcaggcgtaaacctgtcccccaatgccaccacttacctggacccgaagacactggctctggtcagtaccacctacggcgggaaacaagccccccaaaacagagaacggattgacatctacaaatacgccttcatttcgcacggccgtgtcctgacacagaacgacatagccagcttctgcaaaaaagaactcggagaactgctggtgcggacagaaatccggaacggggtggaaatcagcccgatgccgcacgaaggactgatccgaaccaaagaagtccatctgattcttggaacgaaactggatgagccttcgcaggaaaaacagataaaagacaatctgcgtaccaaactctcggcctgttcgccggacacattcaactaccggatattcatagaatacaataaagcataaataccatacttatgaacccagttacccaacatctcatttcatcgtacctgctgatgccgctgctgaccgtgattttcggaatcgcggcctattttatcgcacgcaagaacaaactgctcaacaacaaaaaactgattgcgtatctgctgctgtgcggcataatccttgccctgcccggcctgtccggattcatggactataacttcatgccttatgcctacatcctgctggtcatcctgtactggactgccggatattacaaccggctcatccttcgcaaagtgttcgcgtcaagcaaggaaatgccttctttcggcatccaatgcctgctgacggttacggtcatgcttctgggagccggactcttttccgtagtgttcaacctctgcaacgaactccagtacggcatctgggcctccacctgcctgctgccctttgcatttccactcctgtattcccaaacggtgaacagctatttcgacatacccattgaaatttataaagtatggaaatattcggaggaatatgactcggataccttgtacatcaaccgtgaacggagcatcgtaatggatgtggacatattccgcagggtggatgaccccgcatcggaacgcataaccggcaaggcatccgaggatgtcatcttcgggcagtggttccagcgcatgattgacgactgcaacctcaaatcaccgtcttcgcccatcgtatataagaatgaaggaggagcctattacgaatgggtattctataccaaaccgtcctttttcaagagacggcgctatatagaccccgacgttacacttgccggcaacaagctgaaaagacacgatgtaatcatagccaagcgtgtggcaaacgaacttataaagtataacgaatattaaatagaaacattatgataggaaaacagagccaaaagaaaaaatatccgctggtaaactgggcggacggaatgcccgtcaacaaagggcatttcacccaacaggaagaccactttacggaccggttgtgcgaataccagtcgtttcatctgaaccgcaatacctacggactcctgccattcaagaaaggagaaccggtttccggcgatttcagcattacggaactcgttacaggcaccttggaagtccgattgaaacgttgccacgcccttacttccggaggttacctgatagattatgatgccggtgaggatgacgaactcaccgccagtttccatatccctacagaagaggaagaagaaaaggacaagcggtgggatgtcatactgatggcagaccctttcgagcatcttccttcgggtattccgaacgagaaggaaatcagtccacgccagcccaatgccttacccaaatatgcgttgagcgtgctgccgagcggacagaccgacggaagcgagctgggaagacactttctgctgatcggccgcctgcgcaagaacggaaaccgctgtgaagtggacggaaacttcatcccgccatgcacaagcatgtccagccatccggacctgaaaggctactataccaaattcgggcaactcgtggattccatagaaaaagcttcgtttgacatccttgccaaagtggagaatgcagaaaaacagaccagcctggccaccaacatcggtatgctgtgccgccatgtcatgctgttcatatccgatatctacttctccttccgcaacgaggggcaatactattcaccgctacacttcctgaatgtattctccacattggctcaccgcctgtatgtatgcctgagtttcatggacaaggaagacaaggaggacctgctgaaatacttcaacgaatggaacggcatcactcccggtgcctacgaaggcctgctgagggaaaattgcgggctgctgtacaaccaccacaatatccgccaactgatggttacggcggaacgtttcctatacctgttcaatgacctgtggacaaccctcagccgtctggaatatatcggcaagcacaaggaaaacatcgttgtcgccgaacgctccagacaaccgaaagaatcgagcgagtcacgctggaacatactggactaatcccctataagcgaacggacatgacggaagaacaagataaaatagtacggtttgacgaacattcccattcattcaacctgccggataccgacttcaaggcggaagtggtggccagcggactgaaagaggccgggtatgatgcagagcgtaccctcatattcagacggggagacatccggcgcggattctcgaaagacatccatgacatccacccggaatattcccattatgacctgacggattacctgtatctttatgtgaacaggagaagcctttatgacgagctgcccgaaggcatattccacaagaacctttaccagtccgagaaaatatcgaaggaacaggtgctggacgaaatccgcatccaccgcgaagaggaatttttcgcccgccgtttcttcaagcctttcgaaatctccctggaccatatgctggtagccttccagaataaggaacgccgcattgacgagatgaacgtacatccggatttcgtaagcatcttttccggtcaatggcccgtactggaactgctgccgacccatctggcggtcatgcttatccatatgctggcctatatggaacagattacagcgagcctctccaaagccggcgagtgcatgaccattctgaccggtgtgcccgtgcatatcaagagaggagacaaatgcgtggtggaagtggattcctgccttattcccaaattgggaagctgcattctgggagacgacatggttctgggaaacagttttgccgacggcacctaccagatgctggtagaaatcggtccactgtccgcccgacggatggagagcttctttcccggcgctgccgacagtaaaatactgaatgcgctgacagaactgttccttccctcggacaaggagatacagatccgctacatcatccagcaggaagatgcccggttcaggctgggaaccccaaccgaacaaggcgcctatctgggtatcagcacctatttatgaatataaaacatcatcctatatgaaaccgaaaaacaacacagaagtaaggaaagcctatctgagattcgcgggctatctgacatgctgcaccatccttgcggtaagcatctttgcctgtttcctgaaaacctccggcatagaagtaaagcgaatcacggagcaggcactggaatatgaccatatctatgccaaagagctgtccctgtcgaacagcatggactccatctaccagtacatgaaactgatgaacacttcaccgcaaataaacgacaagctcctgcaaagcgttgtcagtacgcgcaagatgaacctgctcaaatatgtccaaggcatggacaccaaagattgcaggctttacaggcagctgctggaaaacctcaacatcttcctcggggtaaaagactccatccgtctgctgaatatccaggaagagatggtgaagaaagacctgatgcagtgcatccaagacaactggaaaacaaggcgtaacctgaatgtgggttccggcggcaacaaacaataaaacggaaagccatggacaacaacagaaagacaatgaacaaacgggaaatattcatgggacatgcctatgtattcctgttctttttcctgacaaccgtagcgtgttgtctggtaatcttcatgtggaactcagatttcaagatgtttgaacagaaagagttcgtaaagatcaagatgaaccgcatcaaggatttccagcaggaacaagcggaaagccagttgccggtggactccctgttccgtaaaatagaaacatttgaaccgggcgtttacgcccagtatgaagaagacgacatccattatctgataaacaacctgcggaacacatacgaaaggaacagctgggacaagcgatacaagctgttcatgcacattgccgacttttatgccatgtggctgtccgacaggaaacagctatggagtatcggacaaaacataagtctgttcaaagccaatctggaggagtgcgagataggcttgcagaaaaaggaggaagacttgcgctcaggaactaaaaacaaatgacatgggaaaaatttataccagaaagattctgttcgtaatcgcagccatgctgctgtgcatccttgtcgccatactgatccggctgttcttttccagccgcaccgtgcgtatgacactgacccccatagaggtggaaaccggagaaacggtccattatgcagacagcacccgcaacgcacgctcctggctttgggaattcggcaacggggacatatcacacgaacggagcggagaatacgtgttcaagaaaccgggacgctaccaagtgcgccttcaagtggacggaggactggaaaggaaacagatcatcacagtacacaggagccgggatgattacggaagcgacgagcttgtcaggatgaaagcaccggcaaccgcctttcaaggagaaatcgtatctttcaaaggatacggtccgtcgaaagaatggcgctggcagttcggagaatccggaattgtcgattcgcgggagcagaatccactctacgcctatacagaacccggcatatacgaggttctgctgactacggagaatacccaatatccggtccggcacaccattgaaatccttccccaatatacggagaacgactcgacagacgtgcttgtcatcatcggcaatgacatccgtgaacacttgcaagccatcgtggacggcaagccgttcaatacccattacaattatatcctgaagaaatacctttgcggaaatccggacatagcggtaaccgtcaacaacagcaagaagaatgatttctattcctattgccaaggactgaaaatcatagcacgcaggaaaacccttatagacgaggtgttcgtcgatatgggagacaacctgagcaacgaatgtgtgatgcagctgatggtaacacagcacgaacgcttttccgaacaaaaaaacaaatgaggcatgaaaaagaattgcatatcgacactcataaaaggaggatggatttgcgggtgcatcatctgtatggcatcctgcggaccggtacaccgttttatgcggataaagaatgtaccccgtgaatatatgcgaaactattccatagaaggggtaaaggctccccgcagccagacactgcccaagcataccccgtggattgtctttgccaatgaagcaggaacatcctatctgagtccgagcggaaagaacgagatgcagtctgtgaaatacatggacgcatttctcgtcatcaagcgaaaaggagactggctcagagtcattcaatacgacccagccattctgaaaaacgggaaactgaaagaatggaaacaggcaaaatactgcggatggatcaaccaaaacgacctgttgctgacccggagcggctttaccgacattgttaccggattcaaaaacaaacaggtggtcatgctgaacgacagcgtggcattggccaccccaaaaacgtattttgccaacgactccgtaaaactgttcaaaaatacagacctgacacaagaggctggcaagattccattttacagtgtcgtatatccttatcaaatatcggaagacaaaggatgcaccctcgtggcagacaagccgcagcttgacgcagacagcatagggcatgctgtcatcggatggatagacgaacgcctgctgaccgcccccgaacagcagctccatatagacataacctcgctgccggacagcacgcttgtttttaaagacagggaacggaaagacaccttgccgctatcatccaacgacctgaagcggaaactgcaactttcggccagccagcctgctatccgctacagcccggtactgtcctaccggaacaatgacacgagcttctgcttcaaaacccggcttccgatgccggtcatcgacaaacgggaaagctatgtgctgaatgtcaacggcaatccaatctattacgggactttcaaaaacaagatagagaaggacctgcaaaaaataaacctcatgtttgtcctggaaggaaaagagaacaccatccaacggtttccagccgtggtgaatgccatccaaggactgcaatcgcaactggtgaatgacgacagcttttctttcaggttcggtgccgtgcttaccttcaacgaaccggacagccggaaagaccccatctgcaaactgactcccgactacatggagctgcttgatttcctttccgccaaagcacgtaatgccgagcaactgaaacctacatacggacgattcggcagctggtccggccttcggatcggagtggagcaattcaacaaatgtccagatgaaaccaatatcctggttgtcatcggcgataaagggttcaacagcgagtgggcagactccaccttggtgaacaagctggtaaaaaacaactgccgcatgatcggcttccagctctacggaggagaaccggataacttcaacaacttcgtgctgcaaatcgggaacatgatagattgctcggcaccacgcatcagccggaaaaaacgggaactgattgtatatcccgaacaaatcagaaatgaaaacgaatatgcggaggtgaaccataacacctattgtctggactttccaaatcggagcatgacacagggatggctggtgtttccgcaaaagaacgaatcgctggaactggaaggactgaccaccgccgtggattccatgctgatacaagtgaagtttgacaataccctgctgagcaacagtctggcaagggcattcgacgaagtgggtacacaccgatataggacagattcgacaatgacagcttattaccatatccgccagtcgggggtacaccccatgctatccgtacttccggataccgaacctgcctggagcctgcctgcacagccaatcgtactgccggactcgctgtcctccacactggactattatctgcttgtcaacgaagaggagttcaaacggttgagaaagtatgtggaagcaccctccaagctgatcgttgactataaatacgaagcggtcaaaaagaaaaagcaagcgaaggtggatatctgcgactgtccggacgactacctacaggcagatgccgaagaatctaccgtacgtgtaaagacggacagcctgaacgcaccggaatatgcctcaacccgccgtgcaaggagaaaactggtcagacatttcctttcagagcgcaacagggacagatattgcaaggtagggagaaagactttcctgagaatgcccctatcagaggtcttgcaaaggtttacctcctgcccgaccgactatcctttctttgaagtttaccgtgtcaaggacttgcggaaaaagaaaatgattacggatgcggagctggacatgctgattgaatatttcaaggaaaagaaaaaactgctggacgaagccgccggcaagccgttccagtccaacgggcagacatactattggatcagccgtgacctattaccatagtcattcacctgaaactgtattatcatgatttatgaaactattctgaaaataagaggaatggaggtgccgatactctattataactatcggtgccacatccggcactatgatgacccgaatctgagaaaaatcatacaactccacatccaagtatgcgaggaaatcggcaatcgggagtgtctgccggtcgagggagacctgattacgcttgcgtttgagtgcaagggtgaagaacagttcttctatgactggctgaacgaaggagccatgcacaacggggaaatccatttcatctacaacgaagtggagattgcggacattttccggttctgggactgcttctgtgtgaaaatagaagagtatatgagtgtaggaaactctccgatgatgatggtgctgtatttgtcaccggggattatcaaaaggaataatctggaggttagggagaaggtgtggaaggtgtcggatgtttcaattatatatcaaacttctaccgagaggaaagatgattcggttagcaatgattcaaataagaaaagtctttctgtaatttttgtaaaacctccatttcaattaaagaagaaatttcaaaaagatccattttatgaaattgaaatgaggaagcaattgcaaatgcagcaggatggaataaataatatgactatatttgagtggctgaaaaatagggagaattttaaaaaatatgggcgtaatcctaaatctaagaaaattcaagaagattttagggatagatataggaatgctaaaattgatgagtatcttttattgtatgaagatatggatattaaggctatagaggcaatggttgactcagaattggaaggcttagcagcattacataatcctgatcagatagcaggaggatatgttgatgtggtgactcaaatgggaaataaaagaataaattcgtccattgggtcacaatggggaagtatagaaaaaggtcgttctcttaatattgaaaatgaattgttaaaattaataacagaccctcctcctataacagaagaggagcagaaaaaaataaagatgaatgtaaatttagttgaaaacttagaaattgttaagtagtatgtttgagaaatttttagaaagaagtggaaattctataaaattggaagagtttagtgaggattatatccgacaatacaataatttggtttcggaaaaactaatttctttttggagaatagctggtattggcatttattgtaatggcttgtttagaactattataccgaatgactatcagtatattatagaggaatgttatcctatgtatgattatgaaacagtgactccatttatgataactgtttttggagatatttttgcttatgttaagaatcatgtaattggagattacgtcgtttttattaatataaggtatggaacttttaaaattctatcagaaaatattgacatattgttaaatatagtaattttcaataagagttgtcttgaaaattggtttttattgaatgaatataatacaataaaggaagtgaaggcgatgcctaagatagatgaatgttatggctatgttcctgctttagttgcaggtggaaaggattgtattgataatattcaaatagtaaagattgctccttatattgatacggttattcaattaatgggcgatttaaaaagaattagataatatcaaatcaacacatatgttacagaatgtttttaaggttgatacaatagtttatgtttcaattaatttaaattatgattatagtatatcttatatggaaaatatagcccggaacttcacgaagaagtatccaagctatcttatccataagaaaagcgaagacaagataaaagcctttctgaccgacagggtgaagaccaaagtggaaacctttgtgaatgcagaggcaaagaacgtggcagtaaccgaggtgcgagaaatagcagacctgatagcggaatatgaaggtgcagaaagttcttcatcttttggaccccatcctacggattccccctctttaggaaacaccggagtggagcttgccatgagtgtagacacaggcgcatcggacatccgtcctgtcaatgtagccaaacccacgggggcaacaggaaaacccaagataatgaaaagaagtgtcatccgtgtaaccatggaactggaagtgcagatggaaaccaaacaatacttgcaattcctgcaacagattccagacctgttcagcctgcatgaattccccaatttgagatgccgcgtgatatgcaaccagaaaaaggcaacaatcaacgaagagccagcaccggttgaagtgaaggttttggatgacagaaaataccagcggtggtttgttgcctttacactgttgatggtatgctgcatgggcggaatcatagccctgttcttttccattccgaacctgtacaaacaggacatccacttcctgcggaacgatacgattcatcaggagttttccatttccaacagccgtattgacttgaaggatgtaagcctgacgaatcatggcgggaaagacacacttgtcatcaaggataaaaagataatcatagccaaataaaaagcaatggaaaattcgattcagatacaagggataagaaacatgctatcccatagcggatgcccggaagacctgctggaaagttacctgcaattcctacaaaccgaaggccaacaggtgcagattgtcagaggagaagtctttatgatgtttgaaaaggaagcgcaataccgcaagagaaggaatgaaaagatgaaaggaaccgtaactttctgcaaaaacacgaagaacgatacaggggaatacaatacaggagtgttcatcggaatggaatttatccaatgctgcttcaaccatgggattcctgcacgggtgctgaatgtgcggagagtacatggggaagtgacggagattgtcgtggagttcgggaagtagatgaaaggaatacccctattgcagagctccgacctaataatatgtgggggaaattgatgggaaaatccccccacacacttcatcttgatatttaatgagaggaaggattactccttcttggatgttttttcattatccagccccaatcgcttgcataactccggatcgtttttgatacggcccatctcttcgttgatgatggcctgcgcgtccgacttgatctggtcgtagttacgctgaatctgctgcatcatgatgtcattaccgtccttgtccttgaattcgttgatgaaagggattttcctgtaggccttttcttccgcactgaccgccgcatggtctacaacaatttcggcatggaatattttctgttctatcttctcgccaaaattatccgccacagccccgacaaacgtaccttgcgacagattggcaatcttggatgccgggataagcgagtcaagctgcgtgttgatggaagtggaaacatcctgacggttgatggaaacggactgacgctgctggagcaccttgccgaagcgttcagaaagtgtctttgcggtttctccgaccacctgcccgctgaatatatttcctaccgtgttctgaataaccttggactccttttcaccataatcgcgggtcagctggctgaaatcctgaaaacccaaaagtacgcccaccttgttgcttcgtgccgttgcaatcagattgtcaagcccccggaaataaatggtgggaagctcatcgatgattacggcacatttgagctgtcttttcttgttgataagtttgacaatacgggaattatatagtccgagtgcagccgaatagatgttctgcctgtccggattgttgccgacacaaagtaatttgggttctttcggattgttgatatccaacgaaaaatcatttcctgtcatcacccagtatagttgtggggaaatcatacgcgtaagggggatttttgccgaagcaatctggccctggagctgatcctgcgcccctcctttccatgcatccatgaaaggagaaaggtagttttccaactccggataggaagtcaggacggtgaacaggtccgaataaggcttgttcagtaattccaccgcatgcgggaacgtacaataaatcccgttcttgtaaatcttcaaataccagattattgcagcaagcagaatgatgggggattctacaaaaaagtcaccctgcttttcaatccaggtgcgattgaggttgagcattatcgtatagctcgcctcgtacgcatcggaaatgtccgtcataaattccggattgataggattgcatcggtgagacctgcgcggatcgtcgaaatttatgacatagaaccggggcttgacctcgtacttgtccatattcttcaacaaagaattataggctatggtggacaggtcatcaaacttgtaatcgtagatgtaaatcgcaaagcccttggctataagctggcgtatgtaactgttgactatcgcataggacttgccgctacctggtgtcccgataaccatgcaggcacggaaaatattgacaatattgacaaatccgttattccagcgttttttataatagaatctcgttgggagatttaccgaatactcattctccatcagtcgggtttcctgcatgaaactctcattttccatattgaacacatcttccatgaggttgtgcctgtaaaggcggctcatccatagccccgacatcagcagggcgagatagcctgccgtaagagtaaaaatatagaatgcggtatttgccgcgtgcggcaatggcagctcaagcaaccaccagtttagaaagaacagtgcgcatcctgccaccagcgccgcataaattttaggccaggttatcttttcacctttgactccgtgcgtacccagacaggaaacggccagcagaagcactgccaacagtttgctccagagaatgcagttgaaaatcccggtcgtattattgaaattcaccagaatcctgtccatcaccgcaaggttcaagtgccacgtggtgatactcggataacaatacacatagacgtgtaccaccaaaagaaaaatactcacggccctgccaaattccatgatcttggcaagcgccctcaaatcgtcttcctgctgcataagaattgtatataaatgggttgatacttgttttgtctaaatgccacgtttgcgtccggtcttcttctttttcttcatgcggcgtgcaaaggcttcctcctcatagtcacgcgggttggtttccatcgaaagtatgcccgccgccagttcgagcgtgctgccggattcgtggcggtgatgctgccgaagttctgtagcggaatgtccgccccgttccttttcgggtatgttttccaaccatttgaaatagtcgttgaacacattggcggaaaactccttgcccatgcgtgaaccgttgaacacttcccgtcggtcgtggtcaatgaaggtgacaccgtagatacgtccccgctcattctcacggaacaccacatcgatatttttttgccccagcagttccacaaaccgtttccgtgaatccgcctgccgcaaggcacgggcgatgtccgcctgtatggagggtgcccattttccctctttgagagctttcagattcatcaacatccgcttttccaacagttcattcccgaagcgttttccgaaacgtgaactcttgaacggcggactgaccaccttgccggtatcatccgtggcagaatagacaatgccggtgtagggtatgccggtgtactcccccctgacctgtttcgcctcgatgttgagtgtggaaagcagtgcgctgtattccccgaaagtctggaaacggtagctttccagtacggctttaagggtgttgcctacctgatggcggacatcccccaaggaagcatccaccttttttagttccgctttcggattccgcctttccgtgtccgctccgttgcgcaagccgaaatccgtttccagttcccgacaggcggtcatggaacggcggtgctcgtaggcgtcactgatcttttttccctgtccgtctacacagacactgacgatatgaatgtgggcattatgggtatcggcatgtttgtaggctatgtacggctgattcccatagcccattttctgcatataccgttccgccaactctaccaattgcccatcagtcagctggtcttccggtgccggagaaagggagatatgcaggacgggcttctccgtattgcggtttgccagcaggtagttctcaaaagagagcaatgccagacgtatgtcctcactgggcaatcccaatctgtcggaaatcatgcggttgcccgaaagaatctcggcggtacctgccgttaccttgtcgtagttataggcaagtgctccgtaaaggcttgttccgtgacttatttttgcaaccatttccgctcgtattcctgggttagcaccatgacttttttacatacaagcatcagttcgatgctcagtttctccaacctgtagagcaatgccatcgcacgtttttccccgaaattgttcttcaaggtccggacaacctgattgtagttgtttccgacggcctgaaactgcctgtggaattcggtcagtttgatgtagtagtccattgtcgccttgtcgattttcacaactttaatctgtcccgaaaagatggatttcttgatgaacagcgtgcggtccccggctcccgaatccgccagcaatttttcaaatcttgtgttctcctcggcgttcaggcggaagctgtacttgcggtccgccggatcactcttgggctttctgcccgtccttgtccctgttgttttctccatgcacatgagatttttggtttgtacttttttctcttccggaatccgcgactttggagcggattcccccggcttttagccgggctagttgtttttgtcggacaaaagactttttgtcggacgaaaacacaacttgctctgttcgcttgaacagagaaccctccttcgtcggattgctgcgcgacgttcacggaacgctgtgatccgacgaagtcagttcttttccatcgtctgattccgattttgcaaaattagacagtgataaccgattggtaaacagcgtttgatatgacatttgatgacatctgatgacatctgatgtcaggtaggggaaatgttggtggaagtttcaaaaatagccgctacttttggcacagtgcatgagggcatacattgaaacattgtcctgtaaggggtattgcttgcctgccacaggtggtgcatggtgtgaatgcggcatcatccatatatgtgcaatgccatatatgctgcacgacaatcctgcatgacggaatacattgcatccgtgcaatgcagtatgggatacattgaaccccatattgcatgaatgcaatgcaccttatatggcaatgcccatcggcaaccggtattacactggtgcaatatggtatgcaatgtattcatgcaaaccggcaaacaatgcgtcattgccgtataccaacggatgcattgccgtgtgatgaaacgaaaaaatccggacagatatgaaacaaattatacactctaaattcaagcctatgaagaaagaacctttatttgtcgctttgagcaaccagaaaggcggtgtgggaaaatccacgttcacggtattgctcgccagttacttccattacctgaaggggtataacgtactggtggtggattgtgattatccacagcacagcatcagtaccatgcggaactgggaagtgggaaacattgagaagaacgtgcatctgcaaaaccagctggtggaacagttcggagcaagcggtaggaaagcctacagcatcctgaactccactccggaagaagcccgggaaacggccggacgctttcttgaaaaatcggagctggattatgatcttgtcctttttgaccttccgggtaccgtaaatgtgcccggtgtattccagtccgtaatcaatatggattatgtattcacccccatcacgcaggaaagaatggcaatgcggagcagcatgtcttttgtccttgccatccgggaatacatgcaccggcataaggatgtacccttgcgtggtatccatatgttttggaaccggatggacaaacgtgtttccaaagacctgtataacggctatactgaaattttccgttcgctgaaattgccggtactggaaaccgtcattcccagtgcagaacgttacaaaaaagactccggaatgaaagggcctctgttccgcagcactttgttccctccatcttcctccgcaatgaaaggaagcagtctggacctgctggcagcggaaatagaaaccatactgaaacttcaataaaaacaattatgactaccaaaagaagaacggattaccaagtggatgaggaggcattgaaacgcatgatggcaggagatgtgaccgctttggaaagaacggttcctccggaagaggagccggaaacaaaaagtcaggctggaccttgttcggagaaacaggagaagaaaagcggttcttccagacagcaaataaaaaaagcaccggatggagcggctgattcagatgaataccggagccggtttctgaaagtgaaactgtcgggagcaagaaggcagacctatattaacgatacattgtacagaactgttgccaaagtattgccggtcattgcaccggaaatgtctgtccccatgtttttaggaagtgtactgtcagaccatctggaaaggtatcagcatatcatcaatgaaatatataatcaagaagcaactcaaaagccaatagaatggaagaaatagtttatttatcaatacggttcggctgtaccgcttatctgttatataaggtatggaaacaaaaagagagaataggtaaaatctgtgatctgctttgtactcctcgcaatcggccacaagcagaaaaagacaacggtgaaccgggaaatgcacaggatgtgatgggagctacccgctttgtctatctggacgagaatgccgggaagaccgtcgccccttacatgagccagcaactggaaaccggaagtgattttatcggagcggataaggatattccggaagatgaagtggaatgcaaactgcctttggaggagatgagaatgctgaaagatgaacaggaggaactggacagccgctctcccgaaacggaagccattgctccgatggttactcctgctgacctgctcaatgtaggcgacgtgctgcttaacctgaatggcgccggctcggacgagaacaaatcatacagggcggccatgacactgcattccatccgggaaacggacatgtttgaactgttctcctcccaggtggagaacaagaagctgattgaggaactgatggggaagtatgtggataaggaagggaatgcgttgcctttgaaaagagagaggaaagaaagcaaacatgttactgactggaggaatctagtctgaaaaggcaatatttatcatgttcggaaaatcctgtatgcgttaaagtatatgggattttttatatgatgtacccatttaacgaaaacatgcaacaggcattcttccaaagtggaggaaacctgttttttctttttcatccgttgtacggcaaagacatctgatgacatttgatgacatctgatgacacctctgaatcatagcgtattatccccatttatctttgttgtcgaattcaaatttatgtcttacccaaacgattcgacaatgaaaagaagaatccttttttctgtgatgtgtgcggtcatcgccgcaaacacctttgcgcagggccagggccttgcgggtatcaacgaggcaaccagcctcatgacctcgtatttcgatcccgccaccaaactatgctatgccatcggtgcggtgcttggtctggtaggcggtatcaagacctatggcaaattttccagcggagatcctgacacttcgaaaaccgccgccagctggttctttgcctgtatctttctgatcgtagccgccaccatcttacgttccttcttcctctaaagcctatggaatatccggtaaacaaaggtgccggcaaccccgtcgagttcaaaggactcaagtcgcaatacctgttcgtctttgccggagggcttgcgatggtgctccttatggtagtctttctttacctgacgggggtggaccaatggatatgcttatccttcggaatcctgtccggcagcctgttggtgtgggtgatattccgtttgaatgcccgttacggtgaacacgggctgatgaagctgctggctgaaaaacgacatccacgctatctgattcaccgcaagagagttttcagattattcacaagaagaaaaaaacaacaatcatgagaaatgtattaaaggcggaaacgctggaacgcagattccccctgctatcggtagaaaacggctgtatcgtgagcaaggatgcagacctgaccgtggctttcgaagtggaactgcccgaactgtacacggtaacggcagacgagtatgaggccatgcactcctcctggatcaaagccatgaaggtattgccggaacatagtgtcgtctgcaaacaggactggttcgtcaaggaaacctaccgtccgaagaccgatgacggagaacagagcttcttgacacgcagctatgagctgcatttcaatgaaagaccttacctgaatcacaaatgctacctgttcctgacgaagacaacccgcgaacgcagccgtcggaagagtgacttcaataccctttgccggggattcctgttgcccaaagagataaccgacaaggatgctgccgcccgctttcttgaggcggtggaacagttcgagcgtattatgaatgattccggacatataaggcttcgccgtctggaaacagacgaaatcaccggtacgaaggaacgtcccggactggtggaaaaatacttttccctctcgctgaaggatgagaccgccgtattgcaggacatctgcctcaagcccggcaggatgcgcatcggtgacaaacgcctctgcctgcataccctttccgatacggaagacctgcccggcagactttccacggacatgcgctacgagaggatgtccacggaccgcagcgactgccgcctctcctttgccgcacccgtaggactgctgctgtcatgcaaccacatatattcgcaatacgtgttcatcgacgacgcacaggaaatcctgcagatgatggagaaaaactcgcgcaatatgctctcgttgtcaaaatacagccggagcaatgccattaaccaggagtggacggagatgtatcttgatgaggcacataccaaaggagtgcttcccgtcagatgccactgcaacgtcatcgcctgggcggaggatgcggaagagttccgccgcatcaggaacgacacgggcagccagctggccatgatggaatgcacgccaaggtataacaccattgacacaccggtcatctattgggcgggaatccccggaaatgcaggcgactttccatctgaagaatccttttataccttcctggaacaggccgtatgcctctttgccggagagaccaattacaggagctcgcccagtccgttcggcatccggctggcagaccgccagaacgggataccggtgcatgtggatatttccgacctgcccatgaagcgaggaatcatcaccaacagaaataagttcattcttgggccttcgggcagcggaaaatcctttttcaccaaccaccttgtccgccaatactacgaacagggagcgcatatcctgctggtggacactggaaacagctaccaggggctgtgcaggatgatccatgaccgtaccaacgggaaggacgggatttacatcacgtatgaagaggacaatccgatatccttcaacccgttctacaccgaatccggaaaattcgatgtggagaagcgtgacagtatcaacacgctgatactgaccttgtggaaacgggaggacgagtcgccgaaacgttcggaggaggtcgctctttccggagcagtgaacgcctatatccgaaagatttcggagaaccggaacatcagaccggacttcaacggtttctatgagtttgtcgccgatgactacagaagaatgattgaagagaaaaaggtgcgtgagaaggattttgacattgacggttttttgaacgttctggaaccgttctaccggggcggagattatgacttcctgctgaactccgacaaggaactggacctgacaggcaaacggttcatcgtattcgaactggacaatatcagcagcaacaaagtgcttcttccagtggtgacactgatcattatggaaactttcatcgccaagatgcgcaggctcaaaggtatccgtaagatgatattgatagaggaatgctggaaagccctgatgtccgccaatatgagtgaatacatcaagtacctttttaagaccgtcagaaaatatttcggcgaggctgtggtggtgacacaggaggtggacgacatcatcagctccccgattgtgaaagaggccatcatcaacaactctgactgcaagatcctgcttgaccagcggaaatacatgaacaagttcgagcacatccagcggctgctcggtctgaccgagaaagagaaagggcagattctttccatcaaccaggcgaaccatcccgggcgcttctaccgggaagtatggatagggcttggaggaacctgctcggcagtatatgccacggaagtgagcgaggaagaatacttcacgttcacgaccgaggagtcggagaaactggaagtacaacggattgccggaggaccggagggcagtctggaaggagccatccgccgtctggcggagaaaaagcgagaggaacagaaacaggtatcaaacccgaaatgaaaacgattatgagaaacagaccccttatgaggctggcggtatgtctgataagcatggccgccatgatattacagagctgttcggaaagcggtatcgaccgcgacaagatctgcggaacgtggaccagcgtggaaggcagacctgacgtgctggtatacaaggaaggagaatgctataaggtgacggtgttttcccgtagcgggagaacccgaaggctgaagccgcagacttacctgctggtggaagaaaacggaaacctgtttgtcaatacgggctaccgtgtcgatgtgtcctacaatgaggcagtcgacgtgctgacattctcaccgggcggagactatgtaaggaaggaggaacgggcatgaaggcaagaacgcttctgatcggaacggcatttgtactgggcgttaccggagcacgcgcccaatgggtggtgacagatcccggcaatctggcccaaagcatcataaacatgtcggacaatatcgcccatacctcaaagacggcagtcaatacggcagaaagctttgccgagacagtaaagatctatgagcaggccaagaaatattacgaccagctgaaatcggtcaacaacctgatacaggatgcccgcaaggtgcgtgacatcatcctgatggtgggcgacgtgtccgacatctatgtaaccaacttcggcaagatgatgaacgatgaaaacttctcaccgcgcgaactggacgccatcgccttcggttacacccgcctgctggaagagagcaacggcgtgttgcaggatctgaaacaggttatcaatgtcagtaccctgtccatgaccgacaaggaccgtatggacgtggtggacaactgctattacgagatgcgccgttaccgcaaccttgtgagctattatacgaacaagaacatagccgtaagctacctcagggccagaaagaagaacgacctggaacgtgtgatgcggctctatgggaatgaaacctccaaatactggtagccatgatgccgttgtcgatagattttgccaacctgcacaccatactggcaaccctgtatgacgagatgcttcccctttgcgaggacatgatggacgtgggcaagggacttgccggactgggtgcgttgttctacgttgccgtccgtgtatggcagtcgatggcacgtgccgaaccgatagatgtttatcccctgctgcgtccctttgccataggcatctgcatcctgctctttcccacgctggtgctcggcacgctgaacaatattctcagtcccatcgtgcagggcacacacaagatgctcgaaggacagacgatggatatggaacagtaccggatccaaaaggaggaactggaaaaggaggccatgctccgcaatcccgaaacagcatatctggtaagtgacgaggagtttgaccgtcagctggatgaactgggctggtcaaccatagataccgcctcccggctgggcatgtatgtggaagtcgggatgtataatctggaaaagaaaatccgggatgcattccgcagcctgctggagctgatattcgcagcggcatcgctgctgatagacaccgtgaggacttttttcctggtcgtactctcgatactgggaccggtagcgttcgccttcagtgtatgggacggattccagtccacgctcggacagtggttcacgagatatatttccgtttacctgtggcttccggtcagcgacctgttcagcaccctgcttgccaagcttcaggtactgatgcttcagaatgacattcaggaactgcagaacaatccggactactcgatagacaactcgaacagtgtctacatcatctttatgctgatcgggattatcggatacttcaccgtgcctacggtagcaggctggatagtgcaggcaggcggtgccggaaacttcagccgtaacctgaaccgtacagccaccaagacaggggggcttgcagccggagcaggcggtgccgtattggggaatatcggaggcaggctgaggggcaaataaaccctgcggagcctccttcccatgagtcgggcaacccaagatgacgggtccggtgacttgtcggaacgggatgtcccgtcataccggaaatatttattcattcaaaccagacatcaaaaaaatggaattcaagtcattgacaaacattgagagcagcttcaagcgcatccgcctgctgctggcggtctttgcctgctgctgtgcgctcgttaccggatatgcgctgtggagctcataccgctttgccgagaagcaacgcgagaaaatctatgtgcttgacgggggcaaatcgctgatgatggccctttcgcaggacctctcacagaacaggcctgccgaggcgcgggaacatgtaaggcgctttcacgaactgtttttctcgctctcaccccagaaggatgccatcgagcacaatatcaaccgtgccctgcaactggcagacaagagtgcctatcactactatgtggattttgccgaaagagggtattacaaccgcctgatttcaggcaacatcaaccaggtggtgcatgtggacagcgtggtgtgcgactttgccgcctacccttacaaggtgcggacatacgcccggcagctgattatccgtgaaagcaacgtgaccgagcgcagcctcgtaacttcctgctcgcttcaaaacacaggacgttcggatgacaatcccaacggattcattatcgagcagtttaccgtgctggagaataaggacataagaagtgcggaacgatgaggggaaaacgcggattcttcggccatgcggacagccgggtacggctgttctgccggcggctgacaggaaagcagcgcatccttctggcaggcacggtctcgttcctgcttgctgcctcctgtctgtactcgattctctcctgtgtatcccgtttcggggagccgggccaaagaccggcaatgggacatatccgttccgtcgtgttccggtcggaaagaacaagaaacattcattcaaacatccataaacatgaaaatggactttcagaaaatcagggaacggctcggagtgtcaaatgacaagccgctgactcccgaagagaagcgccggcgcgcaaagtatattgtctatccgtttctctgcctgctgtgcatggggttcctcctgctggtattcagtccgtcggaaaaggagaaggcggaaatggaaaaaggcaagggtttcaacgtggagatgccttcaccggaagattcggaaatggagggcaacaaggtaagcgcctatgagcaggaagcactggcaaaaaaggaaaaatggcgcaggggaaccttccaggagatgtccgaactgctcaacaagggcggtcaggatactgccggtcttactgcaggaaaagcaaacatggaacttccgccggaaccggaaaaggggaaagcccccggctccatccgttcctctgcagaagcctaccggaatatgaaccgttcgctgggcactgtatatacccggaatgaaaatcagccagatgccgatctgctccgccgtattgaggatctggaaaaagaaaggaagccggcggaagaacaggcggaaggccagaccctggaagaaaagatggctctgctggaaaagtcctacgagctggctgcccgctacaacgggaaagagcctgatgcttcctctacggccaatgccccaaacagccggaaagaacggacggctgtccggcctgtaaaacgggtacagaaccggatggtgtcatcactcgcccagcctgcaggcaatgaagacattgcttccggatatgcaggcgagagaaataccggcttccacaccccggtaggcaaaatgccatcttccggcaggaacaccatcgccgcctgtgtgcatggcacgcagaccgtatctgacggacaggcactgcgtatccgcctgcttgagccgatggcagtggacgatctccttatccccaaaggtacggtactggtcggcggtacacgtgtcgagggggaacggatgggaatcctgatcgagacagtggagtacaggggcacgctgtttccggtggaactcgaagtgtatgacgctgacgggcagcagggaatccttgtaccgaactcgatggagtatgatgccgcacgtgagattgccgccggcatgggcacctctataggaagcagcatcaatatctcaacggatgccggagcgcagattgcctcggatgtgggcaagggggtgatacagggtatgtcacaatatgtgggcaagaagatgcgcacggtgaaaatcaccctgaaggccggacaccggctgttgctgcattctcctgaaaaatgaaggaggaaaggaaatcaaccatttattcaccaatcaaccaagaaacacacatgaagaagattctgatgatgcttgccctgattgcgggcacagtggctgcatacgcgcagcagagcagcggggattattatgaaggactgagccgcaagatcggattcagccggatgattcccccacacggtctggaaatcacatatgacaagaccgtacatattatttttccctctcccgtgagatatgtggacctgggttcgcccaatctgatagcgggcaaggcggacggtgcggaaaatgtgatccgtgtgaaggcaacccggaaacatttccggagtgagacaaacatgagcgtaattaccgaagacggcaacttctatacattcaacgtcaagtatgccgacgagcctttgctgctgaatgtggaaatgtgcgacttcatccatgacggagaggccgtgaaccgtccgaacaatgcgatggaaatctacttgcaggaactcgccggggagtctccccgtctggtacggctgatcatgaaatccgtgtatgaacagaacaaacgcaaggtcaagcacatcggctgcaaacggttcggagtgcaatatctgcttaaaggactttatgcgcacggcgaactgatctatttccataccgaagtgaagaacgccacgaacgtgcctttcgacgtggacttcgtgaccttcaagatcgtggacaagaaaatcatgaaacgtaccgccatgcaggaacaggtcatctatccgcttcgtgccttcaactatgtgacccgtgtggacgggaagaagaacgagcggacggtgtttgccctgcccaagttcaccattcccgacgacaagaagctgatagtggaaatgtatgagaagcaaggcggccggcatcagtcctttgatgtagagaatgaggacctggtacgcgcagaaaccgtcaatgaactgaaagtcagatgaacgccatgaaaagaaactccctctttattaccctcctgcttgccctctttacggggcaggcagaagcccaacgccgcctgccgggaatgaaagccgtccgcttcaccactgaaatggccgacggattttacagccgggcaaaccgtcacgatgcaggctatgccttctcgctggctgtatccacctgtaccgggaacagaaaccagtggatgtttggcggtgagatgctgaaacgtaacatcccttaccggagtacgcatatacccttgtcgcaatatacgggggaaggcggttattaccatacgttcttttccacccccggcaagtccttcttcctgaacctcggcgcttccgccctgttgggctatgagaccgtgaacgaaggagaccggctgctggatgacggagccgttttgcagcaatgcgagtctttcatctatggcggcgcggtaacgctggaagcggaaggatacctgtccgacagggttgtcctgctggtgcgtctgcgtgagcgtttcgtgtggggcagcgcctcgggaatctgccacttccagtatggaatcggagtaaaatacattttctaaccttaaaagaatacatacccatgaaaagaaaaatccttgattttatgctgacagcctgctgtatggcattctcctttcttggtcttgtcgcttgtgacaatgagctggatatcaaacaggaatacccgtttgcggtagaagccatgccggtagcggatgagattaccgatggggagactgtggaaatccggctggaaatcaagccggaagggaactttaccggaaccgtctatacgctaaggtatttccagccggatggtaagggcagtctgaagatggaggacggaacggtactgaagcccaatgaccgttatctgctgaacgaatggaaattccgtctttactatacttcgcaaagcggcaaggaatcccagaccatagacctctatcttgaagataattgggggaatctgcaacaattgacatatgattttaatggaaaggatacggatgaagaaaataacaaggaggctgcatgaaaagaataccggctgttatgatctttctgttacttgtcttgtacggcaaggcggaaaatcccccgtctgacaaagataaggcggtagcctgcatcaagcggtgggaaggctggcaccgggggaaaatgccttacatcggttacggacaccgcctgcttccccacgagacgctgaccgagaacctgagtgaggcacaggcggactcacttttgagatgcgaccttgaacggtgtttgaaggtattccgaaaatatgggaaagattcgctccttttaagtctgttaggctttaatgtaggctgttaccgtctgatcggcaacggcaagatacctaaaagcaaactgattcagaaactggacagcggcaaccgggatatttacaaggaatatgtatcgttccgctgttatcgggggaaagtcattccaagcatagagagaagaagaaaagaggagtttgaactgttctatataccgtagattgcttgttgataaaggtttggttgttacgagacgaccgaatcttttttatttgtccggtatgaacatatccctaacaggtgttgtattttaatgtaaccgaaagacataaaatgtgttattgagcatatggtgcataaaaaatgctctttgaacattgtctttcttgattttttgctaagtttgagatgtaatgtcaaatgcataaaacaagtcgtcatgaattcagaaataatattggaaataaatggctacaaatgcaatctactaaagtataaatactgtttttcccgtaatatagaccgtaaaggaagacctgtaacaggaatgttaggaggaaacatatatatagaaatggaatctaatggcagcaattgtattttggatatgatgcttgttgatacggatcggcagcgttccgctttcttttctcatgcagaaccttttccggtttgggggaagatactgcatagcatagacgatatgatgtttcgtgaacttttacttcgtatcgttatatcattgaaaagtttacggatacaaaaaacgcctaagctatcacctaattgtggcaatttgcgatgaaacctttctgaaagtaagtgtaaccgcaaagaatgcttttcttcgtctttatactcgaattgcttttcaaacataatctgattgttctgttctcctttgacaatgatagtggcttccttaccattgtgggcttgtacttcaattgaaattattgttctgttcatacttacaaattttctttattctatatataaaactttgggaaagatatatgagtgacattttgtcagaatagagatataggcatacctcttgtacatataaaagtgtcccctaatattcgtagtatcaggaggaaaaggattcgtttaacactgtaaaattgaacaaaatatggtataaatattggattgaatttaccccatagggaataagacaaaagcttatttggttagagaagtgattggtaataaacttgctcttaccgcacccgattatactcgtttatacttgggtatgtctgaagttgaaaagataacggactgtaatgtgttatttaaactgggaaaaatagatttttaaatattggaatatgaaagaagaaagatttattgaagaagattttgaaggttttctggaggacttgataaagtctggtcgtttagatgacaaagaagctggtatagctaaaaggatgttggacaaaggatatgacaatttatctgataaacaaaagtatgtctttaataagatgattaggaataacagcgttgaggaatgtcaaagatgtgcttgtgatattccttggtctgaaatgcttgaagctcttgataatggcggttattgtaactactgtcagcatatgatggagaaactggaaaacgagtaagaaaataacgggaatagctatcaaggttattcccgttaatgtttaatcagttattataaatcagacaagcctatttagggtattgtcgtaaatactcacctcatataaataataaataaggacatttttcccaaccatattatgattatatgaacgaaaaccataaagacacattacatattgaaagtattcagcaactaaaaaaacaagaatcctgatttagttgatgcttttctggaaggagatagtcttttatttagagtgcactataatcaaaatttaattccatatacttaccctgttcaagttaaataacgagcaaatagctgcttggataaaatgacttgaatagtcaaattagatacatttacaaagcgggcagagtcataaaatgggaaagggctaaaaacagaaacgccacaggtatgatgtgatatacatcaccttgtgacgtttctgtttttttaagatgtatttgtctgctattcttacttttgaagcaagtattcccctattgaaagataccggtctttgattgtggcattttcattgaatccattcagacaatggagcaaggctttctccaaagtggtgtatctgcggttaaaacattgcggattgtccaggcaataggcattcaaggcatatctgtatggggcatattcaggattatcctcttttgtgattttcacatgccaaggaaagtgtatccgcagagtgaatgaccgtgtttccccttttgtaatccgttcctcttcctccagcatttttttcacgagggacctgtccagcaacggatatccatattccctgtaatgtttgatatggcagcaatactccgttgcgtattgcttcaattcttccggtcttataccatagtgcttcccatagaaaagcagcacttccctgcctgttacgataacgggctttccgtccgcttcatgtttaaatacctgccgttccatcttttccctgtctgtcagcaaggcaaaaccgaaacattccgtaagggtgaaactttccctgccgggaacggacagcccaataaggctttccaatgtgtggcagtaaaagaaaataccgtcatcggccataccggtgtccggtgaaagcataattcttacatccttgacctgaccgctgtccctttggacaatccggcaatttgcgtaatgtggctcacaagcattctctttcttgaacctgtggtatttctccaaaatttcgttccggatttcctccttgtcggtcagggcaactcccaatccgcagttttcgcaccacccgtaataaaaagcttcgtccgtgaagtggtcgaactcttttgtgttggggtttaccattgcctcacacctgacattggccgatccgcatctgctgcacactatattattttccattgttcttctgctttacgggcgactcacggccgcccttgtcatacaattcggttgttattctcttaatttatctttacccggttcatcagctgtcccgaaatttcatgcagttcccggcagcgttctggctgctgttcccttgcaaaggcggtgattccctgtgtcagtttccatagcgtggccccgcctgtaactccgtcgtcaggattgttgttcatcagcagtttctcgacctcacgtccctcgtttttcaacaaggctcctttctgcaccagattcttcagttccttgtcgaaatccacgtctatctccgatgctccttgaatttcgatggccttctgcatgatggtgtctttgctgtacagtcctttggtcaggtcggaaacagccgatacggtggtctgcgtgtccagttcgtaggtcttttgggagagggacagggattccggcagtcggcctccaaggtgtatctgccgcatgacggactccctgaccatcccgttcaggcacgccccgttgagcaggaacgaccgcatatcgaccgatccgttgccatagtcggatgtggagaagcgtgctcctgcgaagatgatgaccgttccgttcttacgggtgggtatctctatcggagtgggcaggattgtttcacaccatactttcgtgtcgttcatataggcatcggacacgaccgctccctgtcctcccgcctcacggatgaaagcggtcagtatatccaccgagttcagccgacggtaggagtccgacaatacgccccggacttccattcctaccgcccgtatcagtacccgtgtacgctcggtccatcccgaatgctcgttcaggatggtggcgcacaactgtttctgccaaacatccccggcggaaagctcgcgcaggtatttggcgggaatgcccatcttctccgaaatctggcttatggcgttgccgtgcaggttgaagttcccttcgggcattgccatctgtacccttccttccgctttgaaagagataacggggcgttccttgctacgttggcttaccccgatgggagcgatgaaatcctgcgcgatccgtccctcactgagcagacggttaatggtgtccatgacaccaccttgcctgccttctatcatccgctgtaccttgttaatgactacctggttgaggccctgctgcttctgtaccgatgcagctgccggcattactgttgtttccataatactatgtttttaatgttgatgaatcagaatttattcttagagcttgtcttggttgttttagcatgtcccatgtatttttcttctgacaaacggatataatcctcttcgctatatccggtcagcccgaacagttcataatatccggggaaagtttttttccccgcttccggtatatgcatgctggttcccttgtggcagcagatgatatgccggacaaagcggtaacacttgcaaagatcagccacgacggtatattcgttgtccgtatgaggttcgtaatatccacaggaaagattgatacaggatacttccagaccgttccttttcaaagccgccacatctgtattcagtccctgtgccggcttgtagccgtacttccggacatctatagctgaaatgaactcgttggagcagagcttcatcccattgatttgtgttaccatatccccgttccctttccggtcacactgaatcacgaaacggcaatcggaaaagaaggacatatcggcatggctgctgcctatgcatcccacctcctcctgtacgaagaaggcacatttcaccgtcttgcaatcctccaggcatttcaggcagatccagatgccgttcttgtcatccgcaccgattccggtcatccgtttacgcttgtgatcatagccgacaatcatcgagtccgccacaagatgggctgcataagagcctgtcttgcgccggtgtacctcatccatgtgcgccacgacacaggggtagctttcccggttgcctttgaccgcatagatgtttccgtacctgtcttgccggaaaggaatctccatccttttgagttcctctatgatgaatttagccatcttcccctctctgccagagggggaagaaatgccgtaaagagccattagtttttccatgataatgatattttaggaaatgaacaatttttcgatttgcaggtatcgtctgaattccggtacgggacgccctttacgaaagagaaaagacggatatttctttcctttatattccactgataatcctttcaggactttcccgaatacggtagatacatagtacatatcctgacagttcttgcagaatgccgcatccgggaagatatgtatcttcccgcatttgggacatacatattttttcctgtttgcacacccttccgtgctccggcaggtggctatgctcgtgtcgccctccgtatttctcagttccaggttaccgtccgtcagatgaaggctgtagaacgtgtcgaggtaaggcacccctttcttgtgccacctgcaggcgggcactttcaccgtcaaagagacctgtatattatctccggccgcccattcctgcccctcaatgggattcagtacggtgaaatccgtcgtatgtgtataatcgttgtatctgcgtcgcaacaggatgcctgcctcctgcgcctgcttgcggatcagttcgacgacgaatgcgtgtgaggaatagatacgatccagcagggaggcggcaatcggtgtgtttattgatttccacaatgttatctcgttccatacaatggcccgtccgaccacattgctgctgtcatcccttgccacgagtattttggctcctgcgaaattggcatagaaatccgctgcattacgggccttgtcttcatatctcatacaggagttgtgcaggctggattcgctaccgtcagatatgggactatagttgctttccagataagcctccataaaatcgttcatactgtcatgcagtctgattgtgaccttgctgtccagtgagatggcgctgcagaaatagttgatttcatcgggctggtacggtcccagatttttgaacagctcgataaacgtggacggttccagatctgtccggttctccggaaaccagggtgcctgcggattgttccggtccgggaaattgggatggcccaagtctttgttgcatgccgtgaacacgatccggattttcttgaacgtgccggcttccgtccgtttgcgtttggtggagaaaaaattgtaggacccccgtatgacttcttccaccggtacattcttttttacttccgaaaggatatctttggctatcacacttccgttttccgccgcatgggtcaggcgggatttcaattcgttgctaacattcagtttcataatcattcggtttattgtttataaattctgttgtttatatggcaattgtttcttgccaggctgcatttggcgcaatttctctttccgctttctgagcaggtcaacggacatgttcctgcttgtccgatattcctcctcactcatccggcgaatggagggaatgcccgtccgggtcagcgtatggtttaccatccagccgtccatgaagttttcggggcagaggctgtcatggtggatgacctcacctatgcagccatgtacgagcatgttgcaaacggtcatcaggcaacaggtacggctgacatcctctgcaaccagataattacccaggtggcgtacatgatatgccagcagcagccttccgcttccgcatgtcgggtcacagatacgttttcctgtcgctgtctcccccgaatcggtacataagaccatcaggtcgcagatatccggcggagtgaagaactgtccgttcacctgccgaccgcttttggaggatattgccatgaagaggtcaccgaacgcatcaaaccatccgccggattgcaattcccgctgcatgagccgtatccatccggtaagcatttccataaaatgcctgttctgctgccgtttgtatttccagtccataaggggcggtgcgccgggagagaacccgtgaatgacatagcgcaggaaatcgttgaaaacggatatcggatcgtagccgttcgaataggcgaaatcacagaccattttctcaagcggacgtatcgcctgcggtgtgttgtatggtaccatattactctgattttttatagattgttactatatgtcttttatggtcagtctgtatcctgacgggagaaatgccaaggaaagagagatgggtgtccgctttcagcatgttccattcccatgcgggaagttccttccattccatacggtatgcccagagtatgaacagaccgggacggaatccgttgaaaagctttccgtgcagaatcccgaccagccgttccagttcttcccgcgagtaaagggtgaatgcctcattccgatagacaaaggcatcagccggttcaatatccggctgacactcgatgaggtatctcttccattcttttgtggtgtactttccgtacagaggatcgggttccgtgtatttccatgccctgacgaatgtgtggaagaggacggcaccgttcctgtgccttccggtatgcccccacatccggaactgtttgctgcgtatgccatcgggaatcagcaattccggaccggttgtaacccaagggcctccttcggtattgtaaccggtacacttttcattttcatggcaaaaaggtgtctgtgggagaaggcagatatgaacttcccggtcatcgcccctttcaatgtgtgcctgcggataatagtcaccgccacgggtgatataagtgacaacgtctcctgcagtcggtaaaccggctctttccctgtcctcccgcatccttgaaatcagccggttcaccttctccacatcacattcctttatggagcaggcacacccttcatgcctgttgagcagagtcagactttccaggtcataaaaattaccgtacttcatattgagatcgtttttgttgatacaatttgacctgacgggcaaccatgtcgcagaacttctgtccgttctccttctcgcttctgaaataggcaatcatgtcccagagattccgattgaagtagccggtccatttttcgtaatagtgacctccatagacctttccgaacgtttcctcgaaaagtgcaggagtcagcccttcatccccgtggtggttgtattgccacagggagacaagcagcagctggttataatccagtgtttccatatctgttcttttttaagtaaaacatcggcctacatgggtaggcatttttatttcttgatgtctttcctgtctgttttccggggattgcggcaaggcttggcgaaagaaaataccgcagcgaagcgaggatgattttctttcagccaacccagcccctgaaaggggccgccttgcacaatcagcccggaaaacggctatctttacagcaagaaatgaaaaagcagacctcggattctctgttctgaagtctgcttttcggtcattgtcaagtttcatgtttttcaggtatgtatctgccatccgtggaacggctgcaatgttacggcaaacgacctgtcaggtattccatgatagagcagacctcccacgatacctgtccttccgtcgggatagtgctgtgtgaagccgaacgagtacggggcatggtcatagtagagtgagatttcgcagggataatcaggattcccttcccaactcttcaaccgttccaagcacttttgaagtgaggtgtcaccgatggattcggcatagcgctttacgttctcgaaatgttcttcattcaggattttcataacttttgtatttttatcagttaaacacgtccggctccgggagccggtatttttatttctcgcctgcctgacagtcccgtggccgtacccgcaaggtttggcgaaagaaaataccgcagcgaagcgaggatgattttctttcagccaaccccgcaggggcctgaccttgtacgggtacacaggacacgggactacctttgcagggtgggaaataaaatatacggttgttttttgttgtgggattttgtgtggattccttagataatcttcctgatttgttcgccattgccggacaaatgctgtatttttgcaatttctaatttcaggattatggaaaactatgtaaagaaagcggcggatgctttccttgtggagcgtccgtacggtatgcgtgtggattacaggaagaaaggattcgtgctgtttaaccgtaacctcaatgtgttgggaaatgcggaacagacccgtctggaagaactacctctggagcggttcaatgtggaggagattccgttggagggtgaagtcgtggaggaacacgcgggatttaccgatgtattcttctataccgatctgaccaatccctatgccggatatgtactgaatttgcaaaagcttaaagcctataaccggttgatgtttccgctggcaatggcgctgaaccgtgaattgtgaggccggaagccggtagcggtaacagctgcatggagcagaccgttaccgccccggatttaattatttgccctctttttctgttatgaacgccagatagacggacacggccttatggcatccggtaaagtccggagtccggcagcccttgattttccggaaactgacggttccgttcctgtcaatgcccctcacatgcctgttgaatgtccctttggttctgatatggatgtcaaaaccgtcccttccggtgatttcaaggaacatttctcccgtgatccgttccccgtccaggaatttctgtttctgttcattgagcagccgctgatgttgctcttcctgcactttgcgctcttccgcctctttctccttctgctccctgcgtttctgctcctgtattcttttatattcctcacgggcttgcaccaagggggtggtgtcaagtccgagagcttcgaacacgcggacggagatcaaattgacgaaggctcctctttccgcactttgaagcgtatccgcaatccagttcctgcaataggtggcggcttcctctctgcaaccttctcccttgaggaaccggcgtgaatactgcccgctagagaaataaacgttttcaatccggcagaccacatggaaacagtcatcgtcttcattcccgtattcgttctttctcgacagggagagatatacattctccgcgtacggctccagttccatataaggagccacgacggtattcccatcagacttgtacttgaatacttttgctttcatactatcgttcagtttgtcggttgttgcatatttcatctataatctctttcccgcttctttcacccttcaggaaggcaaggaagcgcctcaaaaagagccgggcacagtcagttcccagctggaagctttcaccgtctttggtagcacatacagcaaaacgccccagtccgaaactgtcctgttgtggtacgatgtggtaagacaagtcctcgcttgcgttgatgtgcaacccacgacggaaaacatagaaagttttcgggattcttctgtcggtatcgatttccatacgcttgtaaccgtgatgttccaataatcggcccagttccctgtttgtcggaattgtatgtccgatccagtccggccagcttatattttctattgtgtgtccgtaattgtcatataatatgttgaactgttcctggtattcatcgtaaaattccccgttcccgttgcacatttcctccaacgcgatgccgtttttacggacaagggcaaggtcgcccagtccgcacgcgatttcattgagcagcgtgcgttcctcatccctgttctttgccgttccgtaaattctaagccgggaatatcggtgtagcgccgaacgggacggcatatccagtttttcccatattccatcgtttcctatagcctgtctggtgtttcccggaagtccgtaccaccacttgtccaaattgtttgtatccataatttctgaatcagattgttttcaaattctgttttgagtaccatgcctgatacgcggcggcatactcctgacgttcccgttccagggaatttctcatttcaggggtgtacccgagcaggcggatgtatcctccgttatagccggtgggttcgcactttattccggcttcctccagtttgtcgatgcgtttttgggccatttttgcgcttgaatattccttcggccaaaaatagacttcgccccgtgagccgaaacagtcttcccccagaattatttccccggcatacttccggctttcgatgatgccgaaacgcgctttgcccaatgcctggcgcattgccttgtgtgccggaccttccggatgcttgaatacctccggcttgtctttgctgccgagtttgggcggttccaccttgtacggctgtttgtaacttccgattccgagcgtcaggtaaaagttggtatgaaaatagtccgtcatgggggcgctgtcatcgaaattgtacgacatgacgaaatcgcagatattcatcattacatcctttgccctgtccgtcaatgatttgtctgaatggatatgatggtggttgacatcgccttgaacttttccggactctttggtgaacgcctcgaaatccgctttcatcaaccggatatggatggagtggtaattctcccgtctggcagagaacttgtatcccggataggtctccttgagccatgcccgtaccagtcccacgatttccggagcgtgctgccccttgtaattgcggcctttccagcggtattcgttatacacatacccggtgtattcctttgccgtggctcccggatagtcatattcatatccggttgaggtcgagggaatatccggtttttctttccaagcctcaaaaagccttccaaactcggtggtcacctgttgcatgattgcggtgtcaccacccttgtccgggtggtgctccaatgccagccggcggtattctttcttcaagtccgccagagagtgtatgttctgaaaataagtcatagccataagttttttatgcccctgcgaggcggttgataaaatattcccggtagtcaagctcaaaaccgaggttgagacaggccgtttccatgtcatcttctctcaggtcgtccgcctcctgcaattcgcgcaggtaccgtatttcggagtccaggtattcctgtgcttccgtttgaccgcaaccgcatgagttgcagatcagactgataatgtttccctgcatgctgtttgattttttatgtttctgttcctgtttctgaggcctcgtccgtcatatatcgagacggcccgttccaccagaatcctgcggttgtcttccgagagttccaggtagaaccgttccgccgcgccgaatgtgcccttgtctgtcgccacgcaccatttttcccagaaatgcgggtacatgccgccatacacggctttgcattcctcctcgctccaggcgttccacatgtagtagaagaaactggagacggtattttccgcttgatatttcatggttcttctatttgtgattctacattgtttgtttctctcagttgatgccacacagcctcatacatctcatgaagccagtctatgttctttgcgccgagttcaaacgggctgtgacactgcacctcgtcaccgctttctttctcttcggcaaggacggtcaggctgtccgccgttacccggagtcctgtcaccctgcattcatatggttctccgttcttgccaaaccatatcacccagaccggatcataatcctcttccggaagacgaatttctttcatgcagtgagcatggagcaactgccgtatcgcgtcgatgatgtccccccgcagttccttgatcctgccgctgaaatcaacggcttctgacggtaaacttccttttccgcctctttcctgcaaggagagaatccgcgtgtcgggatggatacagaaatcccactccaacacttcatcgtcatcgcgtgtcgtgtggatatcgccgcccaaaacaagaccgcaatcgtcatttaccattctttttgcttcatcgcggtcttctgccgctaccgtgtaagtgccctcgaaggaataccttactcttatgtcatatcttttcatgattctttccatttgattgttgataccagattcattgcccggaaggattaccggatattcaatattgcgctaaagacatgtgggtcaagcctgtaaaacgtcggaaggttaagtgtgaccatcgggtagcttacccagccgctctgacgtttatagcctgtatcctcagccaatttgttggacagaaggaactccatggcatcaggattgttgttgatgtccacgaatgccctgtcaggcagtgagaatgccgccttatcttccaggttaaccgtcaggaccgtgtatatctcatgggtcacgggatctttcagagacaatgccggccagccgttatggtatatttcaatcacgattgagagacggctttcctgatacaggaaagtctcttccatggacggatggtcgcatttgataatttcaaaatcatcctcccctttggtaaatgtcaccatcggataggatacatcgacaaaacattcctcttcccggtaacagagatgttcttttccctctgaacggattatagccaatcgggtgttcatattcgtaactggttttaaaattattgacttgcaagttaattggtcggaattcacctgcttgtttctttaaacgtgtgattgtcaccgcctgcggacatttgggagagttgctgtctcaccgccttgattttcccgatcagttcgtcctcccttcggaatgagggggtacatttggtacgcctcatcccggctccccaggggatgccgccgcatacttttctcaggcgtgccttttcgctttccaaggccgactccagacgggccaacctgcgtcgcaacgattcttcggtcacagttctcatgatctcattgtttttttagtatggtgacggatcggaaagacagtcaccataccgtcgttatgtgtcacgttatattttagctttttcccttttgatgcctctcaggacgtacaacaggtgtaggaacagctccctgtcgtaaatccggaagaagaacggctcgcctgtttccctgaccgttccggtaaacgacacggactcccggttcacgggatattggaagaagttgccgtttgccagcagggtgtgctttttcttcatcacttcgcctaggaacctgtccatatcgtcgtttccctcatagccggagaagtagaggaaatgatgacggcgcaggcttcgcaggattttggcggtttccagcctcacatccctgcctgacgattcgtccgttcctctcatcaggttgcagatgaactttttctcgccatttatgtcaagaaacagataaggaactataattatagaggcatgccgtgcgtggccggagatgaccatcggcttttctttctggatgtctcctttgaaggtaatgttccggtaatggttgtccatctgccgttccagctccttccttggcgtggtaacggagcggagtcccgtgaagtagcgtccgcccgcccggaaacagaaccggtagatgtccgcatgataaggctctcccaggaaaaagaaattccgggtatggcggatggggggcaagacatccatgtagtcgaaatatctttcttccgtaatctcactgaacggggcgcagagggattgcaggtggatgcgtatcattttgcggacggtatttccggacacggctgtgagacacgggttcttttccctgtctctcagttcctccagtgtctcatggtggtagtcgccgtgtattccgtcagacatggtggtcacgcagctgccgtcaaaactgcgtgaatcgactacgaatttcagtttgtcgttattcatggttcagatgttttgaaggttcaacactcttttggcggcactgagggcattggaggtgagctgccgttgccatgccttgtttttgggtgaccagcggaatccggaggatttcagttcctttcgtctgctgtcttcaggaatcctgtcaaacaggatctgaaggcggtcttccccatagttccatacaagtgtcccgccctcgaacggcacttccttgttttcccggctttgcatcgctttcagcttttcgcgcatccgttccgccagttccggcaattggaagaatttgtttctcggtgtgatgacgggtttcttcacccttgcgttatattcggaaatgaagtccacggccctacggacgatttccacttccccgtgattggccaaagtggataccttgttcaggatgctgctgacaaacagggcacggctatagccccggcattgtccggtatcaatcccgtggatggtatcggcactgctcttgatgtcgcgtttgagcgtctgccatgccttttcctgtttctcttcctccggtcgtgcggcttcctttttccgtctgacggtttcaagaacttttttccgccaattgcggaattcttcgtaacggttctgatagcttctgttcgttttttcctgcctgtagtaatcaaatccgctccgtcccgtcaccatcgggttggcacagcgggagaggaccgagagctgggcggacaacttctgccggtaggcggcgatgtatgtatcccgttcctcttccggcatgagttgcaggtcgttgtgcagcccctctccgtaaatcatgatgtccgtctcgccgcgaatctccggattgaaggaactccaggcgtatgcgtcgcaagcctgtttccacatatcatccaaataggcaggatgtttgaatgctacggcttcccagtctttgaagtccttggaatgcaattcattgtgatcttccggatttccgtacaggtgtacatagttgcccgttccatgatgctcctttctgaaatggaacggtacggggggatagtccgtaccttttttccggatcatcgtgaccctgtgtgcattctctatggtaaggtctgctacttgctcttcgcagacctttgctgttgtttcattcataatcattacttttttaaatgtcagccgtaaatcatttcttccagttcatcgtccgtcaacaggcggatctcttcgtccgaacaatagtaagcgatttcttcgtccaaatcgaatgctgtcggatcaaggcttctgatgccatccagcagttcctgttccagtctttctacggaaaccagatagttcccatctttgccttgcacttcccgtgcaggatagctcatttcccgataaaccaacatcgtcatttccggattggcttcctgctgtcctttgcttgtcgtctttctgttcatacctttatttttttaagtttgacatgatcggctccatggagccggattttcgttttcttacttgcctggctgtcttttgtcggggattgagcaaggcttggcaaaagaaaataccgcagcgaagcgaggatgattttcttttagccaaccagcccctgaaaggggccgccttgcgcaatcaacccgacaaatggctatatttgcaggtaagaaattgaaaggacggcaggatattgtgaattatagattacaaaaaaagccatccctagggggacggcttaatgactgaatttgtatacttattgtgcaagacgctccttcacgttgttcattgcttctttcaggctgctgttcatgacccgtgcataatgctgtgtcatacgtgtggaggcatggccgagcatgacggaaacatcttgaagaggcacattgttggcaagcgtgaccgtagtcccgaaagtgtgacgggcaacgtgcgtggtcagattcttcttaatgccgcagaaatcggctatttccttgagatagctgttcatcttctggttgcacatgacgggcaaacagcatcctttcttaatgcaggtcggatgttccttgtatttctccaatatggccaggggtacgggcagcaatggaatattgctgatggaagaagccttcctacggtgttccaatttgacccttccttttcttatccaccagtctccgagattgtcctgtaccagattctctttgttcagactggcaacatcggagaatgccagaccggtgaaacacgcgaagacaaagacatccctgaccagttcaagccgtggaatggtgaatttctttttcattacggtctgcaactcgtcataggtcaggaataccggatcggtctcgtcctgctccatcttgtaaccgtaaaagggattcttgcgcatccattcctttgccaatgccatattggtaaatttcttgaagcatttcatataacggactatcgtgttccggcacagtcccgcctccgttttcaggtagatgtcaaacgcacggatgaactccggtgtcagctcatggaaagtgacatcctcctttccgtaataagaggggatgagcagctgtaatttcttcaccacgttcttataccggttgatcgtgacgggagagtagtctatacccgccagtatttccatttccttgatgccttccctcatggtgccgagcagtgtacgcatttcggtgtctttcccgaaaacacgtttaagaatcagttttggggtaatcagggcctgttccaataccagttccttgtgtttttccaaggcgcgtgcgtgcagttcggcaatataggcgttcagtgccactgatgccctgtccctgcctttactgcatcctttggcggcgttccataagttcaggggtacgcttctttggatacgtacatcgtcatagtctccattgatggttatccgcatcaataccggtgcctcaccgtttttcaacaatttcgttttaagcacgaaaaacagaatgttcattgttccttgtttcatcacttttgttttttgaggtgttacattcaattgtttcgtcaaaaccggatggcatgaggacgtggagcgaaatgttaaattcggtggtttttttgagggacttgtggaaaagccataaaaatcccatttttctcaggttcgaattgccttttgtatcccgggttcgattccttttttttatcccgatgggaaataccgaatttttaaatttctttcactttttcgacttcatccggtcatgtgtgcaaaattactttttcacaccggagattggaattgtcaaacagctgaaaaacaatgaagtatggtgcgtatttatggctttttcaaaagccttaaaaaaagccactgaattggcgaaatccaacttcacaaatatgtagcggaatgcgtagtgagggtaaaaaaagaacccttgaactatctctaattcaagggttttcatgtgtgaaaagcatttatgtactttctttggtggtgccaccaggaatcgaaccggggacacaaggattttcagtcctttgctctaccaactgagctatggcaccaaaatggttatcggtagagcttttcactttgtaatagaagacctctcagaaactattgtttcttgttttcggttgcaaaggtaggcatattttttgattctacaaattttttgcaaattttctatgaaattctttttgatttcaaaaaaatgctttacctttgcactcgcaaaacagaaacggaatgtagcgcagttggtagcgcactacgttcgggacgtaggggtcgggcgttcgagtcgcctcattccgacattgtaaaggataagccactgaacttcagtggcttatctcatttttagcaaatccgccgggacgaaatcgggacaccctattttatgggtcaaattctattctcggattataatgctaacatcctaccagccgaatattttttgtgaaagtatatagggaggtaagagtttttcgttatctttgctccctacatgataaaactgattttattttcctgttaaccattaggatcataagatataccttcttgatgatttctttaagtaaaaaatgagaattaatgaatatgagaaatttgtttttgactttagctttcggtctatgttccggcgtattcgcccaaaatacgactgtttttgaatctcctattatggggtggagctcatggaatacctatcgggttcatatcaatgacaccttaataataaggcaagcggatgctatggtgcaaaaaggactgaaagaagtgggctattcctatgtgaatatagatgacggtttttttggatggcgggatgaaaaaggagtgatgcgaacacatcccgagcgtttcccgaacggattgaagggagtggcggatcatattcattctttaggattgaaagccggtatttattcggatgcgggaagcaatacttgcggttccatctgggataaagatatgaacggcataggttccggtttgtatggacatgaatttcaggatgccacgttgtattttaaagagtggggatttgattttatcaagattgattattgcggagccggtcaggaattgaatctggaagaagaaaaacgatataccgaaatacgccaggctatagataatctgggttgcggacatgtttctattaatatctgtcgatgggctttcccaggtacttgggctagaaaccttgctcgttcatggcgaatcagtgcggatatccgcccggagtggggatcagtaaaatatatcatcgataaaaatctttatctgtctgcctatgcgggagaaggtcattataatgatatggatatgttggagataggtcgagggctaaaacctgaagaggaagaggtacattttggaatgtggtgtatcatgagttcacctttgttgataggatgtgatctgacaaccattccggagacgtcattaaaactgttgaaaaataaagaactgatagctttgaaccaagaccctttaggattgcaggcatacgttgttcagcatgaaaatgaagggtatgtgttggtgaaggatatagaacgaaagcgtggtaatgtacgtgcggttgctttatacaatccttcggatacgatttgtagctttacagttccgatgaatattttggaattaggaggaaaggttaaggcacgcgatctggtgaaacaccaggatttaccggagataaaagggggtgttctgaatcgagaattacctccccatagtgtgctgattttacgtatggagtccgagaagagattggaagcgactgtttatgaagcggaatgggcttatctgccttgtttcaatgatttgggaaagactccgaaaagcatcgtatatgctccgttacatgaagcatccggaggcatgaaggtaagttatctgggagggcggaaagagaattttgcagaatggaaagaggtgtacagcgagcagggcggtgaatatgaaatgactatccgctatgtgcctaaagcagaccgtaagctggaagtctgtgtgaataatgaaaaaaggattcttcttgattcgctgtcggcggatgagactcaaaagatagcttcgattactgttccggtgcatttgaaggcagggaataataagatacgtatgggaagctcattttgctgggctccagatatagactgttttactttgaaaaaagtaagtgagtaggctgataagatctatcttcttgaagtaccactttgataaaaagtaagaatatgagtgtaacaaatgtcacccgtgaggaattgtgggcaaagcaacatttgtcttgcaaaaacatggattatgcggtatgggaacgggataaatccatgctccagaagttgtccagaatcaatggcggctgttctttcgtggtggatgtatataaaggatgttatgcgtatgcttctacgggttttgtcgattggttggggtatgacaggcacaagatagaaacattggaaaaacagggtgattatctggagtcacgtattcatccgcatgatcgttcccaattggaagacttgcaagtcaggctggggaagttcatttataaccagccttttgaacatcggaatgactattgtaatgtgtatagtttccgtatactcaatgctcgtggaaactatgtgcgtgtaacaagcaggcatcaagttttggaacagagccatgacggaaaagcatggctcattatagggaatatgagtatggctcccggtcagaaagaatcagaacaggtggaatgtactgtgctgaatctgagaaatggagaaatgttttcacccggtgttgtgataatgaatccggctttcggtcttaccggacgtgaaatggagatattacgcctcatccaacgaggattcttaagcaaagaaattgccgataaattatgtatcagtattcataccgtccatattcaccggcaaaatctgttgcgtaagctgggagtacaaaactctttggaggcaatacgcctaggacaggagtcggggctgttaagctgatgcccgatttcatcgggtcaaggcatccattctactactcctgtaacaggatgctgctttctccattccttaaatccgctataatcccgcaccccatcccggatgactgcctgataatactccactccgatgattttctcggtttccggtgtttcatattttaatcttagaatagtttcccgtatttcatcggtcataatttccgaaatgcgttgggctaccttttcaaaataaccgtcataacgtgaaccttcccggatgtgaatcatatccatctgccaaagttcattttcttcattttgataccatgcatgccattcgatacaggcttcggcagtatgcagcagattagcgcattctattcttttgatggacggattctcagctagtctggccattgcctgaaagctgtccgtcaggtttaagggtgatgaataaatatggaaatcaatgtccctatgtttcatcagcagccctgttctgagtgaacctaccagattaatttttgcaccggcatcttcccatatctggatgatgttcgtgtttttgataacttgccaggctttttcctgattctgtttggcaatgtcgaaaatattcatacgctgtcttttatagttggtttgcaaaagtagagaaaagctttcaaactgaagatagttataaataactatttattgccggaatgaatcgggagaaagggggtaacaaggaacttagtaatgtttccttttcaagtaaatgacagattgtattcccaacatgatgacaaacagatattcggttgtcatatataccgctaaaggtgcatgtacacagtggctcagccagtaaagataaagaagatataccataatggtaaccacttggaagataaaggcaatttttgtctttccggttccggtgacggcactgatgtagacatatccgggtactgcgaatatataattgaacagcatgacgatgaaaggggggacagtgtgttgcaccagtgtttcgttgttggtgtaaaatccgataatccaataatcacaaaacaatgcgactcctaccagtggaaaaccgatggcatatcccattttgatgattttgtggcagataggaaaaacacctttttgttgtccggctcctaaaagattgcttaccaaggaaccgttggtggctcctaaagaactgacaatcacaaaaaagagggtggaaacgctgcgggttatgttggaaacggccagttccatctttcctaaatgttcgatggcgatgaagaacaggaaccacggcgccatactgataaaagaatgcagcatgctccatacggacaggtaaaacagtcttttcaatagctttccatcaaatatcggttgcagtccatacttgtttttatcaatctttctccacatatggataaggagaatgattaacgatcccatttctgctagcgttgaggctattgccgatcctgctatcccaaattttaaggtaaatattaacaggtaattgaaagggatgttgataagtacggctgctattgcggcccaagataaggacctggtctttattattcccacaaagaaagcccggagtgccagaaagggaaatgaaaataaaagtccgaaactgcgccagtccagatagtccgttacagcctgatagatttccggtgaggtaattaattgtttcaagaggaagggggaaaggccctgtatcaacaaacataaagagagtgctagtccggaaaggaaaaatagtccttgaaagaaggtacgtcctgtttctgcatagttctgttctccattcctgcgggcaatcatgacttgtagtcctatgctgaaaccgaagcctagcatataagttgccagataatatattcctgccaaggcagatgcgccaagttccacttcaccgacatggcccagaaagacggcatcggtaatgttgattaattgctccattaaaacgctcatcattacaggaaggttgatgagccatatttgtttatatgtataattcattgtttaacttaatgtataaccatgcttatgcacttatcggtttagggatggtgcacaatctgtgtggattaataataagggtataaaactctgtaacaaatcttatttaagatccgtcaaaatagccaaatagtttggattggtagtgctattcgttgaatgtagctatatacagagttgatgtttcattagttaaacaattgtgttttgcaggttaaatcaaatctcctggttcggcataaattttgtattcgctctctagtcccttgaaatcttttctgaggagtacaattttagctttgggggtaagccaaatgtttagtggaatggcattcttctcttgaaatgaaaatatagtgctgaattcttttctcaaagactcgtctgaggttgcggtataattagggagtgagaaaaatgaatttatgtagttatacagtatttgtttgcttttcatagatccccctttttcatatttctcatttttggcatacagcataacagatgggacaccttgatggatatgggtttgcgtactcagataatatccgtccagattatttgcatagcctgtggtaaaatcggagtcggttacgtctttccaattgaaagcaaggaaatcttttttatttgtgatatcaatggatattgtatcactactatagattatttcattgtttttgtaacctagcagataagtcttgtatgtgccgggtgaataataaacatgtgcccatttgaaaaatgttgtttccacatatctggcataatttgaatgactgaatactttaaagctatttggggaatgagatgatttccacactatggaatcatacacttcgcttagacaaggtgcatctttaccaaaatcaaaagattggtagaatacaataggagcaaatatgttttgagaacttgtttctgcttctaatataattttgatctctttattttctgtttctttattttggctaccatccatatcggcctcttctttggagcaagacaagacaaagaaggtaagtagtaaaaaacagtagaatatctttttcatgtttgtttttgagttgggtaaatagctctgtttgtaatgtcgaaaacaaagctagcaaatatatttgataatctcagctttgtatcctatattttatttttgactgatgatttgataatcaaaatcggtaaacaaagactttacagagattcaagaggttcctgcacatacctcatatactcctcatagtctatataccttccacccattgactttaagtgtggggtttcaaactgacaatcaatcaaggttcctcccaactcctgaaatgtttgtgccagatagataagcgccagtttcgatgcattggggactagagaaaacatgctttcgccgaaaaaacactttcccaaagtgactccatagagtccgccgaccagacaagattcttcccatacttccacgctggtcgcgaaaccttgctcatgcaggcggatgtaggctttcatgatatctttgcccaaccatgctcccgtttcttccatccgcagattgccgcaggtttgaatcacttcatggaatgcctggttaaaactgactccatattgttctttgttcataaaagtacgcatggagtgagaaatgtgaatctcgttagggaaaatcacaaaccgtttcaggggacaccaccattgtatctgtttttcacggaaagcataccaagggaatatgccattggaataggcaaggaggagacggtctacggagaggtcgccgcccactgccaatagtccgtccggttcgccatagtgagggtcgggaaaaacaagtttttgagttagttgaaagaccatattgttttttatttattggattcatataatatcttctgtagtaacttctccgtatctctgcctctgcggagaagttgccgattcatttaaaggtattactctttgagtacttgcaagctcaattctccgtttcctgctgtcactcttactttacctcctgtttttaatgttccgaataggatttcacgcataagcagtggcttcagctgcgaagtaattaccctgtccatttccctggcaccatattctttggtgaaacctagtttcagcagatgcttataggcttccgggctgagttccattcctacatgacgtgcagacagtttgtttttcagttcgttgagttttttgttcaggatgagagaagccattccgtaatccatatcatggaagacgactgttgcagacaaccggttgatgaattcaggtttgaaagttttcttaacctgtttcaacattgcctctccggcagtaatttgtccgctgaaacctatagaagcttggtgcgcgaattgtgctccggcattggaggtcatgataagtataacatggcggcagtccgctttccgtcctttgttatccgtcagtacggcatagtccatgacttgcagcaggatattgaatatatcaggatgcgctttttctatttcgtcaagcagtaacacacagttgggagttttgcggatagcatctgtcagcagtccgccgtcttcataacctatatatccggcaggtgagccgatgagtttggccactgtatgcttttccgtatattcgctcatgtcaaagcgttgcagggcaatacctagttcggaggccaatactttggctacttccgtctttcccactccggtggggccaacgaagagaaggctggccagtggtttgttttcgtccagtagcccggctttggccatttgtacggcttccaccacttggcagacagcttcttcctgaccgtatatctttgcactgatgcgttcatgcaaggtttctaatgtggcattgtcctcttccttcatggcgagtacatccactttacagatacgtgccagtatatcggttatcaatgctttgtccaccgtttgtgtttctgtatctgtggggtggatttcacgataagccccggcttcgtccaccaggtcgatggccttgtcgggcaaaaaacggtcgctgatataccgtgcggcagctgtgacggcatatgctatcactccttcttcataaactactccatggaacgtttcgtacctttcttttaatccttccactatgtggatagtttcttcgattccgggttcctgtatgtcaatctgttggaaacgccgtaccaatcctctgctacgtgaaaaatagcggttgaattcttcgtaagtagtggaaccgataaaccggatctctcctccttccaaataaggcttgagcatattagaggcatccatcgaaccgtctcccgtccgtccggcgcctatcaggttatgtatttcatctatatatacaatggcgtgtccttctttccgtattccttccataatggctttcagccttttctcgaattcaccccgatattgtgtaccggccaataagttgcctaaatccagttcgtagatacgacagcctgtgaggcgttcgggaacattgcctgcttctatacgtgcagctagtccgtagaccagtgcggtttttcccactcccggttcacccacgtgcagagggttgttcttttctttgcggcagagaacttgaatggtgcgttccaattccacattccggcctataagcggattccggtcttgcagaccttcattgagggaggtgacgtagttgcgccaaggttcgcttttctcttgctcagaggaagtttcctcttgaaactgattcatgtgctcgtaatttgaaatgagggagctgagaaactccggcatatcttctcccactgtttcttttagcagatagccggcccatgaatcttccagttgaagcattccttgtaccagatgaggaacatccatttcttctgcgcttgaatggctgattgtcatataggcatattgcagcagctcggagagttgacctgaaatttccaactcatattctatttcttgaggaactcgttccacttttttcgacagatattcggaaatggactgggacagttcttccggggtacaaaaacactctgccaatgctttttgaaaaggaacttgttccagcaatgcgctcaataagtgttcgggcgtgataaattcatgccgatattgcatcgcttggctctgcgcagaagcgaaagcgtagttcaccgaatcggtatttggtatatccatatcttattcttgattttttattcttcttccggtgtaaccgtgagtcggagagggaaaccctcttcacgagccatacgggtggctttttgtacttttgaccgggcgatatcatacgtatagatgcctattacggccgattcacttttgtgtacttgcatcatcaaagcttctgcttccatcgttgatttgaaaaaaacggtagttaatatctttacaacaaattccattgtagtaaagtcgtcattgaaaatagtaactttgaagcgtcgcggctcgcgaaggtctatacgttctttttctttataagatgattgttgttgttccatattggtatttgtcatacgtacttatggcacaaaggtagggaaagtattggaaaggtagggtagggaagagatgaattttgtagacggatggtctggagctgatgtcttgaattcctttcatgcctgtctgtcattcttaaaacatccatatataataagatgtttcaaggatgacagacgtgtatgaaaaataaaatgtgaaaaaattcaaggataagaggtggaaacttagacttttctgtgaacaaactggccgtcaatccaaatggtggcatggtttccccggaacttcagcaggatatattcggggtcttccggtcctttaggaaaatgatggataaaccagtcttgccataactctttcttggtgccagtgtctgatacaacttccacttctccggtcatggccacgctgtttccctctttgtagaaacatatgccggctttcggattagagcggaaatcctttgtctttgccgaactgtttcctgttgcaaaccagatggttgttaatccttccgttttgattttactcaagggaaccggccggggatacccttctttattgatggaagttagtgtgactacttcacattgttgaagcaaagcttttgctttttctttaagtgatcccattgtttctttttagtttttgatacggtacaaaagtaagaaacgccaggatggcttcgttgtaaaaaaacgacttttatagtttcagatatgttaatgtggtttcttccgtaaccggtaaggataaaaaggaaccgggtgtattgcctgataaggcttttatttccttactcaaatgggctgtgtcatagtatccggcctcaatggcaacagagaagagttgattggaagaggtggaacgcagtaaatccactgcattcttgaatttgataatccggctgtattccttaggggaatatccggtctgatgtttgaacttgcgctcgaagtgtctttggcacaagcatacattttctactaaagaacggataggcagttggcctttggaaaggttaatgcaatctactgcatatgatatctgtttttctatcttgttgttagtacataaggcttgggtgagaaaagattctatcagtctgattttgtcctgtatgtacggttgttcacataatctttctgctagcgagtcgttgaagatacctcctgactcaaaagtgctgattctttgattcccaagttcttccaatggtaattgcatgaagcggaataaaccgcaaggcagaaaacggataccaaacatatggatgcttttcgcataggttattagggtggagtatcggctcatgggacctacaaaataagagcggtagggttgcattataagactttcttgttccgctatgtcagctacttcgccaagggtgaagataaaatcggtgcaaccgtccggcaatatgttgattttcatcccatagtccggattgcctttaaattcccagtatttgtcaatatagggggctaaaagcagggaaggctggtattcattatacatgaagattgttatttctttttagcagcgatagctagtaatactcccagtaccacccctagaatggcggcaaataatacccgcatgtccggaggaagcaggaaagtgatggtgtgggccggataccagaacaaagggatggtctttttgaatacaaagctccaaagtaccgcccaattcaatccggtgaaaatacgtgtcatgggaataggggtggaaagcgctttgatagagccgccacaattcccgatatgagtgtctgttattttatgtaatgtcatgaatacaggagcgaatatagagttcattgtaacggaaatagccagtgcaaccagaaatttggcaagacagaaatccccgttcatcaatgtggaggcatattccagacccatatattccaagaaaatgggagtgccttttgaaaaaataatcatagccatattgatacccatacccagtaccccccagattaccatgcgtgggataataccgaaggtcttgttgtgatacactcctgtgctgatgcgaagcccaagcatttctcccaaagtagctagaatggcgaacttcacaaaactcatgaccataccatggattgcattgaaagatttgtaccattcataaatggtatcgctaataaaaaagggtagaaacaatgctattacaaacaaaaagaacagaatatcactctttttcatagatagaaatgtgtttttcattaatatttgcgacaaagttactacaaaaaagtgaaatgcggaaagttatagtgatagaattgagttacaagggttttagttgaagtggcgataattcgtgaagccattacaatccctgccgaagccaaatcctgacgccgcaacgttacttgttcgtaaccatgcccgaaaatgcgacaaacgggtacggatagcgaaacaatacgttaaggaatagtgagttaccgataactcacgcaaaaatttcggttacggaaaaagattgctccgttcctccccgttttgcgtaccgacaccggactcttcaccaactaattttgaaaccaaaaaattaaggacgatgaagagtacattttcagtaatctattacctcaagcgtcaggtagtgaaaaaggacgggacagtacccgtcatgggacgcatcacggtggacggcagccagacgcagttcagctgcaagctgacagtcgatccgaaactgtgggacaccaaaggtggacgtgtcacaggcagaagcgcggcggcactcgaaacgaaccgtatgcttgacaagatgcgggtgcgcatcaataggcactatcaggaaatcatggaacgtgacaacttcgtcacggctgagaaggtgaagaacgcttttctcggactggaacaccgctaccacacgctgatgcaggtgtaccgtcgtcacaatgaggactatgagaaacaggtggaagcaggcatgaaagcaaaaggtacactggaaaagtaccgtatcgtttacaagcacctgcaagagttcctcgacatccgctaccatgtgaaggacatcgcactgaaagagcttacccccgctttcatctccgacttcgagatgttcctgcgcacggacaaacactgctgcaccaataccgtgtggctgtacgtctgcccgctacggacgatggtgttcatcgccatcaacaacgagtggctgacacgcgacccgttccgcgagtatgaaatcaagaaggaggaaacaacacgcagttttctgaccaaagaggaaatacgcctgctgatggacgggaaactgaaaaacgccaaacaggaactgtaccgtgacctctacctgttctgcgctttcaccgggttgtcgttctcggatatgcgcaacctcacggaagagaatatccgcacctacttcgacgaacacgagtggataaacatcaaccgccagaaaacgggcgtggtgtccaacatccgcctgcttgacatcgccaaccgcataatcggcaaataccgtgggctgtgcgagaacggcaagatattccccgtcccgcattataacacgtgccttgccggtatccgtgccgtcgccaagcgttgcggcatcaccaagcatatcacgtggcatcagagccgccacacggcagccacgacggtatttctctctaatggcgtacctatcgaaaccgtcagctccatgctcggacacaagagcataaagacgacgcagatttacgcgaagataaccaaagaaaaactcaatcaggacatgaagaaccttgccgcaaggttgaacagtgttgaggaatttgcaggttgcaccatctaaaaaagagaagccatgaaacgtgacataatcatcatagaggacaaggcggtcagcgtaaccggtaacgacgtgtggatgaccgccaccgaaatcgccggactgttccatacgaccgtcccggcagtgaacgccgccatcaaagccatccgcaagtcggacgtgcttaacgactacgaggtgtgccgctacatgcaacttgaaaacggactgtacgcagatgtgtacgcgcttgaaatcatcatccccgtcgccttccggctgaacacctacaacacccacctgttccgcacatggctggtgggaaaagctctcgccaaagagaaacggcaggcatacgtgatgttcatacagaacggaaaagccgggtactgctgattgcgcataccacataagacaaggaaacgggcagcaccacaaaaagtgtcgcccgtttccttttttcttgccaaccgcgctcactccagcggcttgcggtaatttgcttccagcacttcacgcagccccgtttccgggtaaagcaccttccctcccaaaagtatgaagggcaacacgcggttgttgcggtattcctgcaatgtgcgtcggcttacgcggagcagttccgccacctcgccgtccgtcaggtaacgttccccgtccagcagaggacggtaactttccagaaaggcggacagccatttcgagcctttgcgcatatcctgcaccacagaggctatcggctcgtcttccatcgtaaaaacatcgttgttctcgttcatcataacttcggattcagtgggtgaataaatcaaatcatctgccgtgcggatagagcgtgccgataagcggtatcagccgcttcacctcctccggcttgtaataaaacctgcggtttatctgcgagtagccgataagccgcctgtcgcgcagcgtctgcaacgtgcgcgaacttattctcaactgcctacagacttcctcgcccgtgagccatctttccatgcgcctcgtgtcgcttttgcgcctcagggcggcgaccttctccgagagtgcgccgaatgccgccaccatcatctcgaaagtctttttctcgatagatactatttccatattcatgcaattatcggtttgcccgcaaaggtaacggtacggtcctgaacacgtgccgttttccgctgaaaggctgcctgttgcgccgtttgaccgggttacggagccatcttccgtaaaaatcttacgtgagtcacgtagtgagttgttaaagccccttttgtttattgccgatttttgctgcagaaacaaaaagaaaggactgaatatgaaagtgataacgatggaaagttccgccttccggtcattgacggaacagatagcggagattgcggcacacgtccgtgccgcctccggcgacaagaaagcggcatcgcccgacaggttgctcaccacacgcgaggcggcgcacctgcttaacgtgagtacccgcaccctccagcgtatgcgcagcgagcaacgcatcggttatgtcgtgcttcgcggtaaatgccgctaccggcagtcggaaatagaccgcctgcttgaagcgtgtgccgtcaacgaggacgcggcgacaccgcaggaattgaaacgcaaccacacgctgcgcactggcggcaaaccaaaaggaaggaggacataggtcatggaactgctcacacgaaacaacttcgagggctggatgcagaagctgatggaacggctcgaccgtcaggacgaactgctgctggcgatgaaggctgaggggaaacagcctactatcacggaaagcatccgccttttcgacaatcaggatttgtgcatgctgctccagataagcaagcgcacactgcaacgctaccgcagtgtcggcgcattgccctacaagacactgggcaagaaaacctattacagcgaggaggatgtgctgacattcctttccaaccatatcaaggacttcaaaaaagaagatatagccttctacaaggctcgtatccataatttctttcataaataacccattaaaacatttttcaaatggcaaagaaaaaagacgaaaaggacgtgctggtagtccgtgatgagaagacgggcgagatcagcgtggtagccgggctgaatgcagacggcacacccaagcgtacccctgcgaaagctgagaacgcgcagagtttcctgcaattcgaccgacacggcgacgtgctggacaacttcttcaagaacttcttccggcagtgcaaggaacccagccgcttcggtttctaccgcatcgcggcagaccaagtggattccatgcttggcgtgatgaaagacctgcttcagcatccgtaccagaacaaacaaatccttgcaccgcacaaaatcgacaccttcccttatcaacagcaggtgcaggaagagatggcggcacaaaagacagagaaacaagaacctcaaaaacaggaaaacatggaacaacagaaagaacagcaggaaagcccgcaacagacgcagggcagacagggctaccaacccatcaacgagagcaaaatcaactggcaggagctggaggacagatggggcgtgaagcgtgacgaccttgaaaagtccggagaccttacgaagatgctccactacggcaagtccgacttggtaaaggtcaagcccaccttcggcggcgaatcattcgagctggacgcccgcctctccttcaagaaggacggtgagggaaatgtcagcctcgtgccgcacttcatccgcaaggagcagaagttagatgagtacaaggaacacaaattctccgacgatgaccggaagaacctgcgcgaaacgggcaacctcggcagggtcgtggacattgaggacagggaaacgggcgaaatcatcccctcctacatcagcatcgaccgcaagacgaatgaaatcacggacattccggcaaacaaggtgcgcatcccggagcgcatcggcaagacggaaatcaccaaacaggagcaggacatgctccgcgccggactgcccgtgcgcgacaagctcatcgagcgcaacgacggcaggaagttcgtcaccacccttcaagtgaacgtggagcagcgcggcgtggagttcgtgccgggaaccggaaggtcgccccgtaccgcacagacgcaggaagccaaaggtgacacctcgaaaagtcaggcgcaaggcggggaaaatgccgcacagaccaagaaggagcaacgccgcaacacgtggatgaacgaggacggcagcatccgccccatcagcaaatggagcggcgtgaacttcaccgacaagcagaaagccgactacgtggcgggtaaagccgtgaaactggagaacgtgaccgacaagcagggcttccatgccacgatgtatatcaagttcaacccggagaagggccgcccgtaccgctacgaaacgaaccccgacaacgcccagcaggtcgccccgtccaacgagagccgcacacaggtggcggtgaacaacgagggcaaaaccaacgaggcgacaaagaacctgaaagagcctttgcagaaaggtcagaccgccccgaaggacgaccgccagcaacagcagcaggagaagccgaaaaagaagaacaacaaaggcatgaaaatgtaatcccgtgtccgccactgaatccaaaataaaatccaaagtatcaacaaaaaagcaagaaaacatgaagacaatcattgcagaaaagccctccgtggcacgtgaaatcgcccgcatcgtgggcgcgacaaagagagaggaaggatatttcgagggaggcggctatgccgtgacatgggcattcggacacctcgttcagcttgccatgcccgacggctacggcgtgcgcggatttgtccgtgacaacctcccgattattcccgacacattcacgctcgtcccccgtcaggtcaggacggagaaaggttacaagcccgacagcggcgtggtgtcgcagataaaagtcatcaaaagactgttcgacacaagcgaacatatcatcgtggcgaccgatgccggacgcgagggagagcttatcttccgctacctctaccactatacgggttgcaccactcctttcgtgcgcctgtggatcagctctctcaccgacaaagctatccgtgagggactgcggaaactcgaagacggcagcaaatacgacaacctctacctcgccgccaaagcgcggagcgaatccgactggctcgtgggcatcaacggcacacaggcgttatccatcgccgccggacacggcacgtattccgtggggcgggtgcagacaccaacgttggctatggtatgtgaacgctactgggagaaccgccgctttacgtccgaagcattctggctgctccatatcgcaacggacggttgcgacggcgaagtcgtgaaattctcatcctccgagaaatggaaagagaaagaaccggcgatggaactatataataaggtaaaggcggcaggttgcgccactgtcacgaaagccgagcgcaaggagaagacggaggaaactcccttgctctacgacctgaccacgctccagaaagaagccaacgccaagcacggcttcacggcggaacagacgcttgaaatcgcgcagaaactctacgaaaagaagttgataacctatccgagaacgggaagccgctacatccccgaagacgtgtttgccgaaattcccaaactgctcgctttcatcggcacacagcccgaatggaaagacaaggtgcgggcaaaagccgccccgacacgccgcagcgtggacgacggcaaggtgacagaccaccatgccctgctcgtcacgggtgagaaaccgctcttcctctccaaagaggacaataccatctatcagatgattgccgggcgcatggtcgaggcattctctgagaaatgcgtcaaggatgtgaccactgtcacggcggaatgtgccggagtggagtttaccgtaaaaggcagcgtcgtgaagcaaaccggatggcgtgccgtctatggcgaggaaaaagaggaaattaccatccccggctggcaggaaggcgacacgctgacaccgaaaggctcgtccattaccgaaggaaagaccaaacccaagccgctgcataccgaagccaccctgctctcggcaatggaaacggcgggcaaggaaattgaggacgacgcactgcggcaggcgatgaaggactgtggcatcggtactcccgccacacgcgcctccatcatcgaaacgcttttcaagcgcggttacatggaacgctgcaagaagtcgcttgttcccaccgaaaaaggacttgccctcaattccgtcgtcaagacgatgcgcatcgccgatgttgccatgacgggcgaatgggaaaaggagctggcgcgtatcgagcgcggggaactgtccgccgacaccttccgcaaggagatagaggcgtacacacgtgagataacctccgaactgctctcgtgcgacaagctcttcggcagccgtgactccggctgcgcgtgtcccaagtgtggcacgggcaggatgcggttctacggcaaggtggtacgctgcgacaacacggagtgcggactgcccgtgttccggctgaaagcgggacgcaccctgtccgacgatgaaatcaaagacctgctcaccgaagggcataccaagctgctcaaagggttcaagagcaaacagggcaagagtttcgatgctgttgtcgcctttgacggggaatataacacgacttttgtgttcccggaggctaaaaagggcaagaaattttcaggacggaagaaatagtattaactttgccacttgttcagagtaatgaattgttcttcgataccggattacactcatactttggatttagtggtggcactcggagggataccgagtgcctttttcttcctttttccaaccgattatcccgttaattatcaatccgctaaatccaaagtaatgaacaacaagaagaaaaacgagggtcagaccgacttttcctattacggtctgtacctgctggactatctccgcacgaacaagtttgaacaggctgacgacaccgctttcatacgggaacgggccgaccgtgccgccgaaacgtatgagagggcacggcttgaaggctatcccgccgatggtgcgcaggaactggcgatggacacgctgctgcgcgggctgcattattcccgttacgccatcctccgcgaagtcgtggaaaacgagtttgccgatgaagtgccggaagagaagcgtgaagcctttgtcctgaaactgctgccgcttgtcggcaacgtgttctccgtctatgacctctcggatgacaatttcgccctgtcttccgattacgacctgctctacacggagctgacgggagcaaccgtcctttacttagacgaatatggcgtttaaccgcaaacagaaactgcgggacaacatcgaggcgatacggacggcattcatccttgacagggaaaacaggacagcgacaaccgaagagcgtgccatacttcaaaggtactgcggtttcggcggtctgaaatgtatcctcaaccctgcaaaggaactgacggatgccgtccggtgggcgaaatccgacctcgaactgttcgccccgacggtggagctgcacaggcttatccgtgagaacagcaaggacgaaacagagtacaagcggtttgtggattcgctgaaagcgtccgtgctgaccgctttctacacccccaaagagataaccgacaccatcgcggacgtgctggcagattacagcgtccgccccgcccgtatgctcgaaccgtcggcaggtgtcggcgtgttcgtggattccatgctacggcacagccccaatgcggatgtgatggctttcgagaaggatctgctcacgggtacaatcttgaggcatctctatcccgaccagaaaatgcgcacctgcggttttgagaaaatcgaaagaccgttcaacaattatttcgacttggcggtgtccaacattccgttcggtgacattgccgtgttcgacgcggagtttcagcggagcgactctttcggcagacgctccgcccagaaaaccatccacaactatttctttctcaaaggactggatgccgtgcgtgacggcggtatcgtggcgttcatcacctcgcaaggggtattgaatagcaccaagacctccgtgcgtaacgagctgttcagtcaggccaatctggtatccgcgatacgcctgcccaacaacctgttcacggacaacgcggggacggaggtgggcagcgacctgattgtcctgcaaaagaacctcagcaagaaggaaatgtcgcaggacgagcggctgatgaccgtgatacagacggacacgaaaaccgacctgaccgacaacgcctatttcatccaccacccggaacgcatcgtgcatacgacgtcgaaacttgacactgacccctacgggaagcccgctatggtttatctgcacgagggcaagaccgcaggtatcgccggggacttgcgccggatgctcaacgaggatttccattacaggctcgccatgcgtctgtattcgggaacaatctggcagtcgggaacggaagaaaaggttaccgttcaaaaggaggcggagcgtcctgctataaaattggaaacggtatcttcggcgcagacggtggaaactccgacggaaaaaccgcaacccgttgaggaaaaaccggagatagagccacgtccgaaatattctgacggggtgcagctctccttgctcgacctctgggggatgacggaagaggtcagccaaccgaaaacctccaaaaagaaaaagacggtgaaaaaggcagttacggcaaagtccactccgcccaaaccgaaagtcacggttacaccgacagctccaactgcaaaacccgctatggagaataaggaggtgaaagcggagaacaccgccaagcctgccgacccggacgacatctatgcaaagctggactgggaaaccaatcctcccatcaacggcttctacgagatgatgatggaactcacgccggagcgcaggaaggaacttcgggagctggcaaggcagcataatgaaaaacatgaaaacagaacggttgcgacgatcacgccggaagtaccacgtgaacaaccccggcaggaggaaacacagccggaagcagtcgccgcacctgctgttaccgatgctccaccggaaacggtggctacttccctttttcccgacatcgaaccggaaaagccgaaggaggaagtcgcggaccttacgccgcgtgcctaccatcgcacgccggagatgcacctgcgcgaaggctcgctggtggctgaccgggggcgtcataacatcggctatctgaaggacatcacgccatacggggctacattccagccgctcgacctgaaaggataccagaaggaaaaggcgttgttgtatgtgtcgctgcgtgacgcctacgagcgtctgtaccgttatgaatcgctccggcgcgaggcaaatgttccgtggcgagagcatctgaatacctgttacgatgagtttgtcatgcgctacggcaacctcaacgccaagcagaacgtgaagttagtgatgatggacgcgggcgggcgtgacatcctttcgctggaacgggtggagaacggaaagttcgtcaaggcggacatcttcgagcatcccgtttccttctccgtggagagccatgccaacgtaggctctcccgaagaagccctgtccgcgtcgctcaacaaatatggcacggtcaatctcgactatatgcgggagataaccgacagcacggcggaggagttgctcacagccctgcaaggacgcatctattacaatccgctcgtgaccggttacgaaatcaaagaccgcttcatagccgggaacgtgatagagaaggcggaacgcatagaggcttggatgggcgaaaaccccgaaagtgagcgtatgccggaagtgaaacaggcgttggaggctctgaaagatgccgaaccgccgcgtatcgccttcgaggatctggacttcaatttcggggaacgctggattccgacgggtgtctatgccgcctacatgagccggctgttcgacacggaggtgaaaatcgcctattccgcaagcatggacgagttttcggttgcgtgcggctaccgcaccatgaaaatcacggacgagtttctggtaaaggggtattaccggaactatgacggtatgcacctcttgaaacacgccctgcacaacacctgccccgacatgatgaagtccatcggcaaggacgagcatggcaacgacatcaaggtgcgcgacagcgagggcatacagctcgccaacgccaagattgatgaaatccgcaacggtttctccgaatggctcgaagaacagtcgccgcagttcaaggaacggctgacgacaatgtataaccgcaagttcaactgtttcgtgcgcccgaagtatgacggctcgcaccagaccttccccgacctcaatctgaaaggcttggcaagccggggtatcaagagcgtctatccctcgcagatggattgcgtctggatgctgaaacagaacggcggcggaatttgcgaccacgaggtgggaaccggcaagacgctgataatgtgcatcgccgcgcatgagatgaagcgtctgaaattggcacataagccgatgattatcgggctgaaagccaacgttgcggagattgccgccacctatcaggcggcatatcccaacgcacgtattctgtacgcttcggagaaggacttttcgaccgccaaccgtgtgcgcttcttcaataatataaagaacaacgactacgattgtgtcatcatgtcgcacgaccagttcggcaagataccgcagtcgccggagttgcagcagcgcatcctgcaagcggagcttgacacggtggaggaaaacctcgaagtgctgcggcagcagggaaagaacgtgtcgcgggctatgctgaaaggtctggagaagcgcaaacacaaccttgaagcgaagctggagaaggtggaacatgccataaagtcacgcacggacgacgtggtggatttcaagcagatgggcatcgaccacatcttcatagatgagagccaccagttcaaaaatctgacgttcaacacgcgccatgaccgtgtggcgggactgggcaacagcgagggaagccagaaggcactgaacatgctctttgccatacgcaccatacaggagcgcacgggcagagacttgggagcgaccttcctttcgggtactaccatcagcaactcgctgacggagttgtatctgctgttcaagtatttgcgtccgaaggagctggaacggcaggacatccgatgtttcgacgcttgggcggcgatattcgccaagaagacgacggattttgaatttaacgtgacgaacaacgtggttcaaaaggagcgtttccgctacttcatcaaggtgccggaacttgccgccttctataatgaaatcacggactaccgcacggcagaggacgtgggcgtagatcgtcccaacaagaatgagatactgcaccacataccgcccacgccggagcaggaggacttcatacagaagctgatgcagttcgccaagactggcgatgccacacttctgggcaggctgccgctttcggaaacggaggaaaaggcgaagatgcttatcgccaccgactacgcccgcaagatggcactcgacatgcgcatgatagacccgcattatgaagaccaccccgataacaaggcgagccactgtgccaagatgatcgcggagtattaccaaaaatacgacgcgcagaaaggcacgcagttcgttttctcggacttggggacatatcagccgggcgacgggtggaacgtctattcggaaatcaagcgcaagctgacggaggattacggcataccgccaagcgaggtgcgcttcattcaggagtgcaagaccgacaaggctcggaaggcggtgatagacgccatgaatgccggaacggtgcgtgttctgttcggctccacctccatgctcggaacgggtgtgaacgcacagaaaaggtgtgtggcaattcatcatctcgatacgccgtgggtgcgacatgaagtcgcatagataattgttggaatgatacttacgggtatcagttttaacccgctgttccgtcagcggtagcctaccgaccggtgcaccctaatgttgtattaagcggtcgggacaaagtacactttcgcaagacaagacagaaccgtgaggggaagtcaagtacggttagtatcataccgtagagtggcgaggctggatagtatggttagcgcaagcgaactgttagtaaacttcgtaatgtcacgaaagagtgtaagatactggcacactctacccaaaagggaagcggtcggttaatcctctccatggtaggattacacggatataagcaccgccggaggatgagacagacctaacctatccgttagttatctatgtggaacatggtaagcctgtatatctcctgtcatgtaaaaaatggcaggtaagctgacagcaatgaaagccgaatggtgtgcaggtataagataacagaaaaagcgaatgccgttctgtaatggagcggatacggattgaaccgacatcacgagctgatgtgggcgacatcatccgacacgaaagtgggcagacttctgtgacgacattagggaggcaatcaaaaccgaatgttgtcaaatggtgattctttacaattaacttttagaactttcaaaaggaggaaagcaaatgaacgaaaacaagacatcgtgtgcgcctgctgacaatcagcaaacactttgggacagaatagactggaataaggcggagttggctgtcagaaagctacaagcgcgtattgtaaaggctcagaaggaaggcagaccgggcaaggtgaaagccttgcagtggacgctgacccactctttttacgcaaaagccttagccgtaaagagagttacttctaatggaggtggcaacacccccggggtggacatggaaacatgggagaaacccgaagcaaaaacacaagcgataagcgaactcaaacgcagaggctaccagccgaagccattgagaagagtccacatcaaaaagagtaatggcaaactgcgaccgttgggaataccgacaatgaaagacagagccatgcaagcactctacctcatggcattggaaccagtgtcggaaacaacagccgacacacgttcatacggtttccgcaaggaacgtcgctgtatggatgcggtaatgcaatgccataacattctccgaaaaggctattctcccgaatggattctggagggtgacataaaggggtgcttcgaccatatcagccatgaatggctgcttgccaacatccctatggataaggcaatgctccgaaaatggttgaaatgcggctatatcttcaacaaacagatgttcccgacagaggagggaacaccacaaggtggtattatctctcccacgcttgccaatatgacattggacggattgcagaaagtccttgcagagaaatataaacgagttagaatcaaaggcaagttatattcgccaatggtgaatcttgtccgctacgctgatgactttataattacctgcgagaaccgtgaaacacttgaaaaggaaatcaagccattggtagccgactttatgtctgaaagaggtctgaccttatcagaagaaaagacggtgataaccaatatccgtgacggtttcgattttctcggtttcaatatccgcaaatacggcaatgaaatattgaccaagccgaccaagaaagccgaaaaacgctttatggagaatatccgtaaggtgacaaaaggccataagggttgcaagcaggaatcattaatcaggatgttgaatgctaaaatccgaggatggggagcatattatcagcatggggcgacacgtgattcttttcatagaattgaccatcagatatttctcgccttgtggcaatgggctaaacgccgtcattccaagaaagggaaacggtggataaaagaccgttattggcacaatatccgagggaacagctggacttttgcggctaagttcaagaaatcaaacggcaaagaagaccaacttaccttgttgaaactggcatcttcgtttcctttcctgcaatatacgcagataaagggggacatgaatccgtttgatgcagattgccgcttgtacttcaataaaagaatgaagtcaaaaatgcttgtgacactgaaaggacgtaagtccctgctttacctatgggaaaagcaaggtcggaaatgtccgatatgtggtgaaccgattgacacgcataaggcatggaacgtaatgccaaccgtccaagacggacggaaatgtaatctgttggttcatgatgaatgtttcaaattatcccgtaaaaccaatggaaacaagaagtagtatgagccggtctctgcacacgaacagagacttagaaaagcttgagccgtatgaggggaaaccctcatgtacggttctgaggggggaagagggcagtaatgctctgacctacccgatcgaccgtccgacctgcaacagcgtgacggacgcggagttagagccggaaacgaaattgccaagcatttcgccgggaacaacgtggacgtaatcatctacgcggtggagaagtcactggacagctacaagttcaacctcctgcactgcaagcagactttcatcagccagctcaaaagcggtgctatgggggcgcgtaccatcgacgagggggcagtggacgagaaatcgggcatgaacttttcggaatatatggcgttgctatccggcaacaccgacctgctggacaaggcgaaacttgaaaagcgcatcgcctcgctcgaaggggaacgcaagtcgtttaacaagggcaagcgtgattcggagttcaagttagagtcgaagacgggcgagttgcgtaacaacacggctttcatagatgccatgacggaggactggaaccgcttcctttcggtggcgcagaccgacagggagggcaaccgccttaatataataaaggtggacggtgtggattccgccgatgagaaggttatcggaaagcgtttgcaggagatagcgaaaaacgccactacgggcgggctttacacacaggtcggagaactgtacggttttccgataaaggtggtgagcgagaggatactcaaagagggattggagtttaccgacaaccgcttcgtggtagaggggaactacaagtacacctataacaacggacatctggcaatggctgatccgatggctgccgcccgaaacttcctgaacgcgatggagaggataccctccattatcgaccagtacaaggcgaagaacgaggtgctggagagggagataccgcagttgcaggagatagcgggcaaggtgtggaagaaggaggacgagctgaagcagctgaaatccgaacttgccgcccttgaccgaaaaatacagctggaacttgcgccgcccacgcccgaagtcgccgaaaaggagaaagaagggcaacaggtcaagccggaagcggaagatgtgaggaacaggcaggcgcaatatcccgaaaatgcaccgccgcagatacgcagtccggcggatagtatcgttgccaaccatgtcataatcgggcgtccgggactgtatgccaaggaggaaacccggttcaaaggattgaaaatataaccttaggaattttatctgaagtattaataagggctatcccaaaaggtctaaaagtaaattttatcctttctgcaagtatctgtaggatggcaactgcatttttttctttttgggcagcccttattaaaatttattcttattttaggttatatacattcatgtccatttatgtaaaaaatcctgctgaccttgtttatgtcttgtcagtcaccatttgcaaaaccatatttgaccctcaaagaggctgaatttgataagcaacttgctacatactcataataaggagctaaatagaacacgaatgggaaatactcaaatgccaaactaaagaagatattggccaaaataaacgctataccgagagagaaacttgatttttcaacttcctaaaacagtgttgttcaaacatttctacttatttgtacttaccagttgaacctacgtttccctaataaaatgtctatggtaaaaagttaaaaaatcctcctacttttgttagatatatttttttgtgtaattttgtaatcgttatgcggcagtaataatatacatattaatacgagttaggaatcctgtagttctcatatgctacgaggaggtattaaaaggtgcgtttcgacaatgcatctattgtagtatattattgcttaatccaaatgaatattataaatttaggaattcttgctcacattgatgcaggaaaaacttccgtaaccgagaatctgctgtttgccagtggagcaacggaaaagtgcggctgtgtggataatggtgacaccataacggactctatggatatagagaaacgtagaggaattactgttcgggcttctacgacatctattatctggaatggtgtgaaatgcaatatcattgacactccgggacacatggattttattgcggaagtggagcggacattcaaaatgcttgatggagcagtcctcatcttatccgcaaaggaaggcatacaagcgcagacaaagttgctgttcaatactttacagaagctgcaaatcccgacaattatatttatcaataagattgaccgagccggtgtgaatttggagcgtttgtatctggatataaaagcaaatctgtctcaagatgtcctgtttatgcaaaatgttgtcgatggatcggtttatccggtttgctcccaaacatatataaaggaagaatacaaagaatttgtatgcaaccatgacgacaatatattagaacgatatttggcggatagcgaaatttcaccggctgattattggaatacgataatcgctcttgtggcaaaagccaaagtctatccggtgctacatggatcagcaatgttcaatatcggtatcaatgagttgttggacgccatcacttcttttatacttcctccggcatcggtctcaaacagactttcatcttatctttataagatagagcatgaccccaaaggacataaaagaagttttctaaaaataattgacggaagtctgagacttcgagacgttgtaagaatcaacgattcggaaaaattcatcaagattaaaaatctaaaaactatcaatcagggcagagagataaatgttgatgaagtgggcgccaatgatatcgcgattgtagaggatatggatgattttcgaatcggaaattatttaggtgctgaaccttgtttgattcaaggattatcgcatcagcatcccgctctcaaatcctccgtccggccagacaggcccgaagagagaagcaaggtgatatccgctctgaatacattgtggattgaagacccgtctttgtccttttccataaactcatatagtgatgaattggaaatctcgttatatggtttaacccaaaaggaaatcatacagacattgctggaagaacgattttccgtaaaggtccattttgatgagatcaagactatatacaaagaacgacctgtaaaaaaggtcaataagattattcagatcgaagtgccgcccaacccttattgggccacaatagggctgactcttgaacccttaccgttagggacagggttgcaaatcgaaagtgacatctcctatggttatctgaaccattcttttcaaaatgccgtttttgaagggattcgtatgtcttgccaatccgggttacatggatgggaagtgactgatctgaaagtaacttttactcaagccgagtattatagcccggtaagtacacctgctgatttcagacagctgaccccttatgtcttcaggctggccttgcaacagtcaggtgtggacattctcgaaccgatgctctattttgagttgcagataccccaagcggcaagttccaaagctattacagatttgcaaaaaatgatgtctgagattgaagacatcagttgcaataatgagtggtgtcatattaaagggaaagttccattaaatacaagtaaagactatgcatcagaagtaagttcatacactaagggcttaggcatttttatggttaagccatgcgggtatcaaataacaaaaggcggttattctgataatatccgcatgaacgaaaaagataaacttttattcatgttccaaaaatcaatgtcatcaaaataatggagcggtcaggaaatttctataaggcaatacagttgggatatatacttatctccattcttatcggatgtatggcatataatagcctctatgaatggcaggagatagaagcattagaacttggcaataaaaaaatagacgagctccgaaaagaaataaacaatatcaatattcaaatgataaaattttctctattgggtgaaacaatactggaatggaacgataaagatatcgagcattaccatgcacggcgtatggcaatggacagtatgctttgccgtttcaaggccacctatccagcagagcgcatcgatagtgtgcgcagtcttttagaggataaggaacgacagatgttccagatagtccggttaatggatgaacaacaatctattaacaagaagatagccaatcaaattccggttattgtgcagaaaagtgtgcaggaacagtccaaaaagccaaaacgaaaaggtttcttgagcatcttcggcaaaaaagagggaacgaagccaacgacaacaacgactacgctccgttcatccaatagaaacatggtcaacgaacagaatgcgcagagccgtcgattgtcagaacaagccgatagtcttgctgcccgtaatgcagaacttaacagacaactgcaaggattgatttgccaaatcgaaaagaaggtgcaatctgatttacaaaatagagaaagcgagataacagccatgcgtaaaaaatcatttatgcagataggcggcttgatgggatttgttcttttgctgttggtcatttcctatatcatcatacaccgtgatgcaaagaacattaaacgatacaaacgcaagacaacggatttgatcgagcaattggaacagtccgtgcaacaaaatgagatactcataacctcccgaaagaaagcggtatatactattacccatgagttgcgtacaccactgacggcaataaccggctataccgaacttttgcggaaagaatgcaatagcggtaataatgggcaatatatccaaaatatactgcaatcctccgaccgtatgcgggatatgctcaacactttgcttgacttcttccgcctggacaacggcaaggaacagccccgtctgtcaccctgccggatttctgcaatcacgcacacacttgaaacggagttcatgcctgttgccgtgaacaaagggttgtccttgtccgtgaagactggacacgatgccattgtattgaccgacaaagagcgaataatacaaatcgggaataacctgctgtcaaacgctgtcaagttcacagaagaaggcggtgtttctttgattactgaatatgataatggagttctgacactggtcattgaagatacaggtacaggcatgacagaagaggaacagaaacaagcgttcggtgcgtttgaacgtctatcaaatgccgctgcaaaggagggtttcgggcttgggcttgccataatgcgtaatattgtgtcgatgcttggcggaacaatccgtttggacagcaagaaagggaaaggcagtcgtttcacagttgaaatttctatgcaggaagctgaagaacagcttggatatacaagcaatacacctgtttatcataacaataaattccatgatgttgtcgccattgacaatgatgaggtattacttctaatgctgaaagagatgtattcccaagaaggaatacactgcgacacttgcaccgatgctgcggcactgatggaaatgatacgccagaaagaatacagcctgttgctgacagacttgaatatgcctggtataaacggtttcgaattgctggaactgttgcgttcgtccaacgtgggcaattcaccaacaatcccggtggttgtggcaaccgcttcgggcagttgtaacaaaggggaactattggcaaaaggctttgccggatgcctgttcaagccgttctccatatcggaactgatggaggtttccgacaggtgtgccataaaagcgacaccggacgggaaaccggacttttccgccttattgtcctatggcaatgaagccgtcatgctggaaaagttgataactgaaacagaaaaggaaatgcaggcggtacgggatgcagcaaaagaaaaagacctgcaaaagctggattccctgatccaccacctgcgcagttcgtgggaggtgctccgtgccgaccaaccgctgaatgtactttacggattgcttcgtggcgatgctctcccggatggtgaagcgttaagccatgccgtgactgctgtgctggataagggagtggaaataatacggttggcagaagaggaaaggagaaaatacgaagatggataagacaaaaataattgtggtggaagacaacatcgtgtattgcgaatatgtctgcaatatgctgtcacgggagggctaccgcaatatgaaggcttaccacctctcaaccgcgaagaaacatctgcaacaggcaacagataatgatatcgtggttgccgacctgcgtctgcctgacggcagtggcatagaccttttgtgctggatgcgaaaggagggaaagatgcagcccttcatcattatgaccgactacgccgaagttaataccgccgtggaaagcatgaaactcggctcgatagactatattcccaaacagcttgtggaggataaacttgtccccctgatccgttccatactgaaagaacgtcaggcaggacaacgccgtatgcctgtattcgcccgtgaaggttccgcttttcagaaaatcatgcaccggataaggctggtagccgccaccgacatgagcgtgatgatatttggtgagaacggcacgggtaaggagcatattgcccatctgttgcatgacaagagcaaacgtgcaggcaagccatttgtggcggtggactgcggttcactctccaaagagcttgcaccgtcggctttcttcggacacgtcaagggagcgtttacaggtgcggacaatgccaagaaaggatatttccatgaggcggaaggcggcacgctttttctggacgaggtaggaaacctcgcgttggaaacccaacagatgttgctccgcgccatacaggagaggcggtatcgcccggtcggagacaaggcagaccggaatttcaatgtccgcatcatcgctgctaccaatgaagatttggaagtagcggtgaatgaaaagcgttttcggcaggatcttctgtaccgcctgcacgacttcgggataaccgttcctccgttgcgtgactgtcaggaagacatcatgccgctggcagagttcttccgtgatatggcaaacagagagctggagtgtagcgtgagcgggttcagttccgaagcacgtaaagcgttgctgacacacgcatggccgggcaacgtgcgggaacttcggcagaaagttatgggtgctgtattgcaggcgcaggaaggtgttgtcatgaaagagcatctggaacttgccgtgacgaaaccgacctctactgtcagcttcgccttgcgcaatgacgcggaggataaggagcggatattgcgtgcgttgaaacaggcaaacggcaaccggagtgtcgccgcagaactgctcggcataggcaggacaacactatacagcaaacttgaagagtatggacttaaatataaattcaagcaatcatagcccgtaattcactgaatttggctatctttgcataacatttgagaaaaacggcgattggcaggagcttttcgccgccaacatataggataagaccgcaaggcgtttcaagcgaaaatctggtaaattggaactacggagacgattgcgtgatgcttatgctatgcttacgcatagcgtgcattcacgtactctccgtaaaggctttaccagagccatcgcttgaaggtagtgtgaattgcacgctacttttttacccttgcctaacgaaaggaaacgattatgggtaaagttcagattctcgccgtactgacgatggacggatgtctttcttcagagttatatgataaagcacatcaggatttgtgccttgaccgttgcggtcttgatgaaatcaggaagaaagccctttaccgtgtgacaccggactattccatttcaatgctgcacgaatggagaaaagacggcacaaacatccgttacctcgcggaagccacactggatacggcagattatataaacggactactgcgtatgcacgctgtggatgaaatcatactatacaccgttcctttcatatccggaagcggacgacatttttttaagtcggctctgccagagcaacactggacgctttcctccttgaaaagctattccaacggtgtatgtcgcattatctatatccttgataaaaaagcaagatagccaaaatgtgcggcaagcatacatttctattttcaggaatagaataaatgttctgattacaaacaatttaagtcggagataatttgtccttgtgaaaaaatattgaattttatacctctgaaatccagtactttgtaaaattgagtgttggattttttattttctgccgcgttttttgccaattatattcatgtgcgcacgcagaaaacaaagtgtaattttcaaaattgacagaaccatgaattatttcttgctggcggaaaccgactttttccgcctgataaacgaagccggtgactgcaatatggaaacggcatacacggcttttgccacccaagtgatcgaactgtgtaacggtagcatggacgcgaaccttaccgtcatcgcgcttgcctacatcgaaatcgagttgcagcaccatcccgtgcgcaacctgtcagaagaaaagagagagattgccgcctatgtcagcaaggccctgtctttcgtgaggaagatgcagaaattccttgccacgccccaagtgccgccactgatatccgccaacaacacaacagaaaccgccaccagcctcctgcaatggacgggcaatgccatcgacctcgtggaacttatctacggcatcgacgagatgggctgcatcaacaacggcaacatgccgctcaaacagcttgccccgctcctttacaagatattcggggttgagtcgaaggactgctaccgtttctacaccgatatcaaacgccggaagaacgaaagccgcacctacttccttgacagaatgcaggagaaattgaacgagaggatgctgcgcgatgatgagttggatcgtatgaggagataaaaaacaaattcattagaataaatcacatcaattcaattcattattttgttatattagaaaaagatattaactttgcattgaaattgatatagtcataattcagatgaactcaatacacgatataacagactacattatcttacgagtaaaatcggaagatagatttgcgtctttaataaatttaaagttgcagaagttattgtattatgttcaagcatggtcttatggtatcaataaaaaacctatgtttgacggcgagtttgaagcatggattcatggtccggtaaatcgagaaatctacaatcgatttaattctacaaaatatctctattcagaaatcaatattgatgattgcatgaatcacaatgtgagtttatcatcagaagacgctgaattcattgactttatattggagaattatcttaaatatagcggtgctgaattagaacgattgtcccacaatgagatgccttggattgaaacacgtggagatttaaatgtaaatgagcgttgtgacaaggttattactccagaactaatgattgagtattatgggaaaaaatgggaaactattaaatcttaattcagattctcctaaatacggaaacaaatcattagttaccaaagaacaagaaaatgagttaaagagaaggaagataactttttccttctcttactttaagcagatacctaattttcagattggagagtgttctaagggatggcatattgggcttcttgaaagattaggtgctttgggtactatgacaccgcaagaagtattagaagaaaatagaggtagtattgcattaagatgtcatccaatagattggagtgctaaaaacattcctattcaacgaaaagatttagattggctaccaaaagaaatattggacaatgagacagattttccaataatgcaattttcgataacaaaaagtacggggcgtattgtaggttattttgatcgggattcttctatatttcacatagtattattagatcctgaacataatatacaaccggcaaagaaaactaattatcaaatacaaccaactacaaaagggttatctcaatatgatgatttattaaataagttggaacgaattaaaagtatcgtatcagattgttctgataaaaagtgcaaattgcattcacatattagtgttatagaagaattacatgacaatattgtttatataggacttgataatgacttctatagcacttatcaagaaatcttaaagaaaattccattgcaaaaaattttggaaaacggaatcttagtaagtatggataatgcttaagttctaaaaaaatgaagaaaggtttatggtaagcctttcttcatttttttatttacttctgctgcaacagatatttcaggttatcatcgcccgcgatgcgctccagttcctcctgcacaatctgcttcacctcttccttgatacgccggtagttcgcctgcaccgtttctttcatgcggtcgttgccgtcctcgtccgtgaaatcggtaatgaccggaattttcttgtaggcacgttcctcccgcttcaccttctcggcatccaccacaatctcgcagtgaaaaattttctgttcgatacgttcgttgaagttgtcggacaccgaaccgacaaacattccctgcgtcagaccggaaatcttgctcggcggaatgagcgcatccatctgcgtgttgatggaggtggaaacatcctgccggttgatggagatagactgccgtttctgcaacaccttaccgaaccgttccgatagtgtctttgccgtttcacctaccacctgcccggagaaaatgttaccgaccgtattcatcaccactttcgcctccttatcaccgtagtcgcgcaccagctggctgaaatcctgaaatcccagacacacggcaaccttgttgcttcgggcggtggctataaggttgtccaaccccttgaagtatatcgtgggcagctcgtcgatgatgaccgatgacttcagcattcccttcttgttgatgagtttcacgatacgggagttatacaatccgagagccgccccgtagatgttctgacggtcgggattgttgccaacgcataggattttcggctcttcgggattgttgatgtccagcgtaaactcgctgtccgacatcacccaatagagctgcggggaaatcatcctcgaaagcgggattttcgccgacgctatctgccccatgagctgctccgcagcccctccgagccaagcatccatgaacggggaaaggtagttttccagctccgggtaagaggtcagtatcgggaaaatatcctcgtagcggcggttcaaaaactcgatggcatggggaaacgtgcaatacttcccgttctgatagattttgagataccagataatgctggcaaacaaaatgataggtgactccacgaagaagtcgccctgcttttgcacccaagttttattgaggttaagcattatcgtgtaggcactctcgtaagcgtccgtaatatcctccatgaaatccgggtgtatgggattgcaacggtgtgagcgtcgcgggtcgtcgaaattgatcacatagaatttcggcttcaccttgtagccctccgggtggttcagcaaatggttgtaggctatggtggacaagtcactgaatttgaagtcatatacatacatcgagaagcccttttcaatctgttgcttgataaaattgtttaccacggcgtatgacttgccgctgcccggcgtacccaacacgatggacgcacggaagggattcaccacattgatccagccattgttccaacgctttttgtaatagaagcgtgtgggcagattgaccgaatactcgctttcgatgagcctcgtttcctgcatgaaactctcattctcgttgttgaaaacatcctccatcagattgtgtttcaacaggcggctcatccacagcccgcccatcaaaagacagacatagcccgtgccgatggtaaggatatacaagcccgtcaccgcttcaaccggcagcggcagagccagtatccaccagttgaggaaaaacagcacgaatccggcggcgagtgccgtccatattcttccccaagtgattttctcgcccttgacccctttcgtacccagacaggacagggcaagcagcaggacggcaaacagtttcgtgtacagaatggaatggaacagccccgccgtgcggtcgaagttcagaaggattttgtccaccacaccgatgttcacgccccatagccggatggcttcgtagcagaaccagtacacgttcatgaccactaaaatgatactcacggcacgcagaaaatccatgattttcgccaatgccctcaaatcgtcttcttgttgtgacatacattgattttttaattgttgatactccgattacaaacccaagcccttgcgctttttcttctttttgcgcttcatcgcccggatgaaagcctcttcctcggcatctaccgccggaccttcgggagtgagcaagcccattccgcccgatacgtcttcacggtcgtatgcggtctgtccgtgtgccttgtccgcagcatccatagggatggataacggtatcggcggttgtccggcgtatggcagggtgaagtgttcctgcaaggcattcgccgaaagctccttgcccatgcgcgaaccgttcagcacactccccgtgcggtggtcgatgaaggtagccccgtagatgcgcccttcctccgtgtagcgcagtacggtgtcgatgcccttctctttaagttgggaaacaaacctatccttgtcataagtgccttgcagcacggaaagaacggtacgtttcgtcatgtctgccagtttcctgtccttaatctccgatctggaacgtacaaacttcttctgcatggcttcatagcctgcggacttcccgaagagcgaggacttgaacgggttgcccaccttgttgcccctgccgtccgtgacggaatagaccagcccgtgatattcccgtccgcgcacgttacccctcgcttcctccaccgtcaggttatagatggaaaggagcgcacggtattcgcccatcgtctggaaacggtactgcccgttcagagctttcacggtgttgcctacctgtttcttcacatcgcctgccgatgcgtccaccttgcttagcggcgtgtcaagacggcggttcctgcgctccgcatcgtgcagcccgtatttcttctccagctcacgggtgatttgtttgctacgatagtagttgttcttgtcgctgatacatttcccgttctcgtccacccgaaccgtcacgatgtgcaggtggtggcggtcgatgtcctcgtgcttgaaaacaagataaggctggttgccgaaaccgagtttttccagatactcgcgggctatatcctgcaattccgcatcggtcaacgcatcctccggatgcgggttgagcgaaatatgcaccaccggcttctccaccttcatctgtggcggcatgaaggtgagaaaaccctccatcgccttgttgatgtccacctttcccgaaccgtcattgtagatgcggttggtcgtaagcaaccgcccctgcgcctcgttaatcttctccccgttataggcaatcgcgccgtacaacgagtttcctacactgatttttgcgaccatttcgcctccatttcccttgaaagttccacaatccggcggctcagtttcacgagttcgacggtgtgttgctctaatttgtagagcaacgccatcgcctttttctctgaaaaatgcagcctcagttccttcacgacttggttgtaattcgtacccacggcacggaactgtgcatgaaaatccgacagtttggtgtaatagtccaccagcgtcttgtccaccttaagcaccttgaacggctgtccgaagaagtgcgccttgaggaaaaccgaccgtgcatagacacccgattttccgaacatggcgaggaaacggttgtgttcctcctcattgaaacggacggtgtaacggtacaccgccggatcaagtttgggatttctccctgatttgcttttccttttctctttcatattactttggatttagcggattgacggcataagccgccgcttcggattacagcaccgcagttttgaaaggcttcccgacttcggagggaaagcccgccccctgcaagggcaaggcgttttccgggatgctcaaaatattttgagcggctgaaaacataccttgctatgttcaggtgaacataaaaatccgtcaggggacggatgggaagatacctttcaggactccggctgtgccaccatcggcgaaccctgctgtccgggggcaaagttacgtccttaaagcggtatcggacagacgcttgacccggtcaatgactgccaaccggcgcaacgtgctgccaattgcttaggaagtgatacaagttccaaaatatacttgtttatttgcagcatgattcaaggaaccaacgatttgaagatatgagaaacggaacattcaaatacccggaaaaccgcttcttcggacacttgccgaagcggatacccgaaccgtcggaaccccggttatccgacaatccggtgaagtacggattcaatgacttcatgacgcagtgtcgtcattcatcacttgttcgccgcaccgcttcaccacagaaccggatacgcgatgacccgcccgtgtgtctgttcactgaagcggataatgtagcaaccaaatccgcatataaatagaaaaagaaatcttcaacaattaaaataaatggaactatgagtaaggaaatcttcgttgcattcgcaacacagaaaggtggcatcggcaaatccactgtcacggcacttgccgccagctacctgcacaacgtgaaaggctacaatgtcgccgtcgtggactgcgacgacccgcagcacagcatccacgggctgcgcgaacacgaaatggggcttatcgacagcagcacctacttcaaggctctcgcttgcgaccatttccgccggatcaaaaagaacgcctacaccatcgtcaagagcaatgcggtgaacgccctcgacgatgccgagaggatgattgccactgaggacatgaaacccgacgtggtgttcttcgacatgcccggcacgctccgtagtaacggcgtgataaagacgctctcgcagatggactacatcttcactccgctgagtgccgaccgctttgtcgtggagagtaccctgaaattcgtcacgatgttccgcgacaggctgatgactaccggacaggcgaaaacaaaggggctgcatctgttctggacgatggtggacggcagggagaggaacgacttgtacggcatctacgaggaagtgatagccgaaatgggctttccggtactttccacccgcttgcccgacagcaagaagttccgccgtgacctttcggaagagcgcaagagcgttttccgctccaccatcttcccgatggacacggcactgctgaaagggagtggcatccgggagttttccgaagagataagcgacatcatcagaccgcagtgagcatgggcagcaggaaagtgaacacggaaggcatcgacgaggaactgctgttagcctccatcgggcggcgcacacaggacgggacactgcgccccgcacaggaagtacccgcagctgcaccgaccgaagaggacaccgccgcaccggaaccatctcctgtgcaacccgtaacacgggaaaaagcgcagagggaaagtggacgccggaaaaggcaggacgaggactacaacgagctgttcctgcgccgcaacgagataaagacccgccaatgtgtctatatcagccgtgacgtccacggcaagatcctcagaatcgtgaacgacatcgccggaggggaaatctcagtaggcggatatgtggataccgtgctgcgccagcatctggaacagcacaaggagagaatcaacgaactgtacaagaaacaacgtgaagatctgatttgaaaatggaaaaagaaatgacaccgaatgaaaaaagaccacagcaagactgcggaggtatgtttgcccaagtgcaggcgagtgtggaaatactgtcgcctgtcccggtaaccgacaaatgctgcgagaaggactatgaacgtctgttcatccgcgacccggaagtaaaggcacgtgaggggaaaatggcgtatgtgcgcccggagtaccacgagcgtatcatgcgcatcacccgtgtaatcgggcatgaccggcttacgctgtccgcctatatcgaccatgtgctgacgtaccatttcaaccagtgcgaggatgcgataaagagcctttatgcccgaaattacaattcagtattctaaccaaaacggaaggatatgaattacacaattagcatgacagacattctgctggcggtatcggtcggctgcaacctctggttcctgttcctgctcctttacgagcgcatcatggacacgcggattgtccgcttcttcaagggcattgccggattatggcggtcactggacgggaatgaggctaaacgcatagcggcacacgaggaagtccctgcggaaaaggcggacatcatcggcgagagccgtttcaggatggcatccacccggacaaccgctgccataccgacgcaagaagccgccacttcggaaaaaggcattgagctgtcggaggaagaggctacttttgacgacggaaaaacgggaaacgcatcccgcccggcacaagtcccggaggaaaaactcgatgagaccttcacgagcataccgccggaggaactgggatacggggacgacgaaccggaagaggacgcctcggacacgccacgggcttcgggcagcagctttgacgagattgacgacgcctgcaagaccgccaaaaacccggacgcgacacaggcggaacgtgaaaaggcggcgaaggtgttcaccgacatggagggcacggagttgtacgagaaaatgatggaaggctcttcggagataggcatccgcatcaaggggcttatcgagattcggctgaagaaatctgaaaaggagttcgtcgtgccggacaacatcgaggagttcgacattcgcaactatgtatgacaacaataaaagaaatgaacatgaaagaatgacatcaacccacgcggcgaggaaacgcaaggcgcatccccatccgcaacggacacgcccacgtccgtggaaacaaacgggcatccactaaaaccaaagtaaagaaacaaagtatcaaccgcccgacaaaggaccatccacccttttgacggcaaaaaacaagaacagtttatgaacaagaacatcttgaaaaacagaaaagcaatcctctccgcggcacttgtcatcgccgcaaccgcctccgctttcgcgcagggaaacggcatcgcgggcatcaacgaagccacctctatggtgagttcttatttcgaccccggaactaaactgatatacgccatcggtgcagtcgtcgggcttatcgggggcgtaaaagtgtacggcaagttttcatcgggcgaccccgacaccagcaagacagccgcctcgtggttcggcgcgtgcatcttcctgattgttgccgccaccatcctgcgctcattcttcctttaataaataatgtatggctgaatacccaatcaacaagggtatcggccgtccggtagagttcaagggcttgaaggcacagtacctcttcatcttctgcggaggtctgctggctctcttcgtcctgttcgtcatcctctacatggtcggtatcgaccagtggatatgtatcggcttcggcgcggcatcgtcctccctccttgtatggcagaccttcgcgctgaacgcccggtacggcgaacacgggctgatgaaattaggagcggcacggagccatccccgataccttatcaaccggcggcggataacccgtctgttcaaacgacaacgaaaggaagaaagacaatgaggaatacatcgaaaatgacaacactggaaaacaggttcccacttttagcggtggagcatggctgcatcatctcaaaggacgccgacatcacggtggctttcgaggtggaactaccggaactttacaccgtgacgggtgcggagtacgaggcgatacacagttgctggtgcaaggctatcaaggtgctgccggactactccgtcgtacacaaacaggactggttcatcaaggaacgctacaaaccggagcttcagaaggacgacatgagctttttaagccgctctttcgagcgtcacttcaacgagcgtccgtacctgaaacacacctgctacctctacctgaccaagacaacaaaggagcgtaaccggatgcagagcaatttcagcacgctgtgccggggacatatcatcccgatggagctggacagggaaaccacgaccaagttcttggaaacctgcgaacagttcgagcgtatcatgaacgacagcgggcttgtcaggctgcgccgcttctccaccgacgagatcgtggggacggagggtaaggcgggacttattgaacgctacttctcgctcatgccagaaggtgacaccaccttgcaggacatcgagctttcggcaagggagatgcgcatcggcgacaaccgcctgtgtctgcacaccctctccgacgcggaagacctgccgggcaaggtggctaccgacacccgttacgagaagctctccaccgaccggagtgactgccgactgtcattcgcctccccggtggggcttctgctctcctgcaaccatatctacaaccagtatgtgctgatagacaacagtgaggaaaccttgcagaagttcgagaagtccgcccgtaacatgcagtcgctatctcgctattcaaggagcaacagcatcaaccgcgagtggatagaccaatacctgaacgaagcccattcctacggactgacctcggtacgggcacacttcaacgtcatggcgtggagcgacgatgcggaggaactgaagcatatcaagaacgacgtgggcagccagttggcaagcatggaatgcgtgccgcgccacaacaccatcgactgcccgacactctactgggcggcgatacccggcaatgcggcggacttcccggcggaagagagtttccacaccttcatcgaacaggcggtgtgcctgttcacagaggaaaccaactaccgcagctcgctctcgcccttcggcatcaagatggtggacaggctcacggggaaaccgctgcacctcgacatcagcgaccttccgatgaagcggggtatcacgaccaaccgcaacaagttcgtgctgggtccttcgggcagcggcaagtctttcttcatgaaccacctcgtgcgccaatattatgagcaaggcgcacatgtggtattggtggacacgggaaactcctatcagggcttgtgcggcatgatccgacgcaagacaggcggagcggacggtgtgtatttcacctacacggaagataagcccatcagcttcaacccgttctacaccgacgattacatcttcgacgtggagaagaaggacagcatcaagaccctgctgctgacgctctggaagtcggaggacgacaaggtgacaaagacggagagcggcgagctgggcagtgccgtgagtgcctatattgagcgcatccaatccgaccgtagcatcgtgccgtcgttcaacaccttctacgagtatatgcgtgacgactaccgcaaggaactggcacagcgtgacatcaaggtggagaagtccgacttcaacatcgacaacatgctcaccaccatgcggcagtattaccggggcggacgctacgacttcctgctcaactccacggagaacatcgacctgctcggcaagcggttcattgtcttcgagatagattcgattaaggaaaaccgcgaactgttccccgtcgtgaccatcatcatcatggaagccttcatcaacaagatgcggcgactgaaaggggtacggaaacagcttattgtggaagaggcttggaaggctctctcttcagcgaacatggctgaatatctgcgctatatgtacaagacagtcagaaaatattacggcgaggcaatcgtggtgacgcaggaggtggacgacatcatcagttctccggtggtcaaagagagcatcatcaacaactcggattgtaaaatcctgcttgaccaaaggaaatatatgaacaagttcgaccagatacaggcgttgctcggactgacggaaaaggagaagtcgcagatactctccatcaacatggcgaacaacccttcacggctctacaaagaggtgtggataggcttgggtggcacacaatcggcggtctatgccaccgaggtcagtgcagaagagtatctggcgtacaccaccgaggaaacggagaaagtggaggtttaccatctggcggagaagttgggcggcgacatcgaagccgccatccggcaacttgccgagaagcggagaaacaaggaaacaaccaacaattaaaaatgaatttatcaacgaaaaaagaaaaatgcgtatgaatttacagacagtgaaaatgctgcaagtcagcaagtgtctgatcggattggcggtcatgatgctgcaatcctgcgacgtggccgacaacctccgtgatatgctgtgcgggaactgggagagcgtggaggggaagcccgatgtgcttatctacaaggagggcgaagcctacaaggtgacggtgttccgccggagcggtctgcgccgcaagctgaaaccggaaacctatctcttgcaggaggaaaacggcaacctgttcatgaacaccggcttccgcatcgacgtgtcctacaacgaggccacggacgtgctgaccttctcgccgggcggcgactatgtgcgggtgaaaccgcagccgggacacccgacagaagaataacaaccactaaaatccaaagtaacatgagaacaagaataacaatgattatctgcctgtgcctgcttttcgcaggcagggcaagcgcacagtgggtcgtaagcgatccgggcaatctggcgcagggtatcatcaatgcctccaaaaacatcatccatacctccaagactgccacgaacatggtgagcaactttcaggaaacggtgaaaatctatcagcagggcaaaaagtattacgatgccctcaaatcggtgaacaatctcgtcaaggacgcccgcaaggtgcagcagaccatcctgatggtaggcgacatcaccgacatttatgtaaacagtttccaaaggatgctccgtgatggaaatttcagaccagaagagctgtcggcaatcgctttcggttacacgaaactgctggaagagagcaacgaagtgttgacggaactgaagaatgtggtgaacatcaccacgctctccatgaccgacaaggagcgcatggacgtggtggaacgctgctactccaaaatgaagcgttaccgcaaccttgtgagctattacaccaacaagaacatctccgtgagttatctgcgtgcaaagaaaaagaacgacctcgaccgcatcatggggctgtacgggaacatgaacgaaagatactggtaagcctatggagttcgataaccttcatcagattttacgctcactttatgagcagatgatgccgctatgtggggacatggcgggtgtggcgaaaggcatcgccgggctgggtgcgctgttctacgtcgcctaccgggtatggcagtcgctggcgagagccgaaccgatagacgtattcccgatgctccgtccttttgccatcggtctgtgcatcatgttcttcccgactgtggtgctgggcacgataaacagcatcctctcacccgttgtacagggcacggcaaagatgctggaggcggaaacgctggacatgaaccgatacagggagcagaaggacaagctggaatacgaggcgatggtgcgcaaccccgaaaccgcctacctcgtgtccaacgaggaatttgacaagcaactggaggaactcggctggtcgccctccgacatggtgacgatggcgggaatgtatatcgaccggggaatgtacaatatgaagaagagcatccgcgacttcttccgcgagatactggaactgctgttccaagccgccgccctcgtgatagacaccgtccgcaccttctttctcgtggtgctggcgatactcggtccgatagccttcgccctgtcggtatgggacggtttccaaagcacgctcacgcagtggatatgccgctacatacaggtctatctgtggcttccggtgtcggacatgttcagcaccatactggcgaagatacaggtgctgatgctgcaaagcgacatcgagcggatgcaggcagacccgaacttctcgctggattcgagcgacggggtgtatatcgtgttcctctgcatcggcatcatcggctacttcaccattcccaccgttgccggctggattatccaagccggaggcatgggcggttacggtcgcaacgtgaaccagatggcgggacgagccggaagcatggcgggcagcgtggcgggtgcagccgcaggaaacgtggtcggacgtgccgggaaactgctgaaataatcaactgacaattaaaaacgaataaacaacaatggaatttaagtcacttaaaaacatcgaatcatcgttcaggcagatacgcctgttcggtatcgtcttcctctcgctgtgcgccgtggtgacggtgtggagcgtgtggaactcctaccgtttcgcggagaagcaacgggagaaaatctatgtgttggacaacggcaaatcgctgatgcttgcgctgtcgcaggatctgtcgcagaaccgtccagcggaggcacgggagcatgtgcgccgcttccacgagcttttcttcacgctgtcacctgaaaaaagcgcgattgaacacaacgtaaaacgtgccttgctgctggcagacaagagcgtgtaccactattattcggacttcgccgagaaggggtactacaaccgcatcatcgccgggaacatcaaccaagtgttgaaggtggacagcgtggtgtgtgacttcaacgcctatccctaccgtgccgtgacttacgccacgcagaaaatcatccggcagagcaacgtcaccgagcgcagcctcgtgactacctgccgcctgctgaacgcatcgcggtcggacgacaaccccaatggcttcaccatcgagggcttcaccatcatcgagaacaaggatttacagacaatcaaacggtaacggattatgaaacggaaagtaaaaagtatcagaaaaacaatgtggggcgcatactggaagctccacgacaaacggaaacggctggtggcaaggctcaaagggtatttggacggtttgccgccggaaacacgccgccgcatcatgctggggatgctcgccgccttcgcggtgcttgccctctataccttcggcagagccgtctatgacatcggcagaaacgacggctcacgcatggaaacgggacacgccggacgggtggaactgccgaccccggtggaaacagacaatcacttaacaccttattcatatggaacagacgaagaatgaaccgacgaaagagaacaaagccgctcccgacacgggaaagccgaaaaaggggcgcgaaccgctgacagaggctcagcggctgaaacggcagaagatgatcgtgttgcccgctatggtgctggtcttcattggggcgatgtggctgatattcgccccgtcctccggcaaggaacaaccgccgggaacggacggatacaacaccgaaatgcccgacgctgacaaggcgaacaagcagattatcggcgacaagttgaaagcctacgagcatggggagatggaagagcgtcaggagagccgcaaccgtaccatcgggcagttgagcgacatgttcgaccgcgagatagcgggaacggaggacggaacgaacttcgacctcgccaatccgggcggcaaggaggaaaaggcacagcctgccgcaccgcagactatccaatcctccgctgccgcctaccgtgacctgaacgccaccctcggcaacttctacgaacagccgaagaacgacaatgccgagatggatgagctgttggagcgcatcgcctcgctggaatcggaactggaaagcgaaaaaggcaggacttcatctatggacgaacaggtggcacttatggagaagtcctatgagctggcggcaaagtacatgggcggtcagaacggaggaaagccggaacaggcggcagagccttccaccgtgcagaagggaaagaagaacacggcgacacccgtaaggcaagtgacccgccaaatcgtttccttccttgcacagcccatgagcaacgcggagtttgtcgccaccttctcgcaggaacgcaaccgggggttcaacacggctgtcggcactacagaggtatcggaccggaacaccataccggcgtgtgtgcatggggcgcagagcgtgacggatgggcagacagtaaggcttcgcctgctggagcctatggcggtggcgggcaggacaatcccccgcaatgcggtggtggtcggcacgggcaagatacagggggaacggctcgacatcgagattacctcgctggaatatgacggtacgattatccccgtggagcttgcggtctatgacacggacggacagcccggcatcttcatcccgaactcgatggagatgaacgccgtcagggaggtcgccgccaacatgggaggttcgttgggtagcagcatcaacatctccaccaatgccggggcgcagctcgcctccgacttgggcaaggggctgatacaaggcacaagccagtacatagccaagaaaatgcgaaccgtaaaggtgcatctgaaagccgggtacagggttatgctctatcaggaaaaggactgaaaacaataatcaatcaaaaaaacatttaccactaaaaatccaaaagtaatgagaaaagtaatcatcatgtttgccctcgctatgggcatcgcatctgcccacgcgcaggagaatgtaaccgttgaaacaaccaacggaagtaatgaacagccgaccttgacaaaggaggtctatccgcagaaggaggcggacggcgacctgtatcacgggctgtcacgcaagctgaccttcgaccgcatgataccgccgcacggtctggaagtgacctacgacaagactgtccacgtcatctttccggcggaggtgcgctatgtcgatttaggctcgcccgacctgattgccgggaaagccgacggagcggagaacgtcatccgcgtgaaggctaccgtgagaaattttcccaacgaaacgaatatgtccgtcatcacggaagacggcagtttctacaccttcaacgtgaagtacgccgccgaaccgctgttgctcaacgtggagatgtgcgacttcatccatgacggcagcacggtgaaccgcccgaacaacgcgcaggaaatctatctgaaagagctgggcagcgaaagcccgatgctggtgcgccttatcatgaagtccatccacaaacagaacaaacgggaggtgaagcatatcggctgcaagcgtttcggcatccagtatcttctcaaaggcatctacacgcataacggattgctctatttccacacggagataaagaaccagagcaacgtgcctttcgatgtggactatatcacatggaaaatcgtggacaagaaggtggcgaagcgtaccgccatgcaggagcagatcatcctgccgctccgagcgcagaactacgccaccctcgtgccgggcaagaaaagtgaacgcacggtcttcacgatggctaagttcaccatccccgacgacaaatgccttgtggtggaactgaacgagaagaacggcggccgtcaccagtccttcgtgattgagaacgaggatttggtacgcgcgggtaccatcaacgaacttcaagtacgctgaccatgagaaagtacatcgcaataatcatcgcgtcgcttgcccttttcacggggcaggcgcacgcccagcgatgcctgccgaaaatgcagggtatcgaggtgagggcggatatggcggatggctttaatcccggcggcaaggatggcgggtacagtttcggggcggcactctccacttacacgaagaaggggaacaagtgggtgttcggtggcgaatacctcctgaagaacaacccctataaggacaccaagatacccgtggcgcagttcacggcggatggcggatattacttcaagatactgtcggacgcccgaaaaatcgtgttcgtctatgctggggcttcggctctcgccggatatgagtctgtgaattgggggaagaaaatgctgcatgacggctccacgctgcacgaccgggacgccttcatctacggcggcgcgctgacgctcgatgtggaatgctacgtggcagaccgtatagccctgcttgccaatctgcgggagcgttgcctttggggtggcgacacgcggaagtttcacacgcagttcggggtcggtatcaagttcatcatcaactgacacgggcatggaaaggacggaaatagatgctgtcagaaggatgccgcttgcggattttctcgcacggctggggcatgagcctgttagaaggagcggtaacgagctgtggtatcttgccccgtacaggggcgagcgcacaccctctttccgtgtgaacgtggcgaaacagctctggtacgacttcggtttgggcaagggcggcgacatcttcacgcttgccggggagtttctgcaaagcgatgactttaggacgcaggcgaagttcatagcggaagccgccaacatgacggtgaccggatgggaaaaacccgcctatctcccgaagccgattgaacccgtctttgaggatgtggaggcagttccgttgtttcgttcaccgctgacggagtatctggcagaacggggcatcccttacgccatcgcatcccgtcactgttgccgtcttaactacggcgttcgtgggaaacggtattttgccgtcggcttcccgaacatggcaggtggctatgaagtcagaagccgatatttcaagggttgcatcccgccaaaagatatgtctttggtaatggctaaagaaattccggctgacgaatgcctcgtgttcgagggcttcatggacttcctttctgcggtgacgcttggcgtaaccggtaacgctgactgccttgtgctgaactccgtcgccaacgtggagaaggcggcgggattgctggacggctacgggcgcatcgactgtttccttgaccgtgacgaagccggacggcggacgcttgccgcacttgtggggcgatacggggagcgtgtcaccgaccgttcctccctctatgacggttgcaaggacttgaacaagtacctgcaactgacaacgaaaaattaaaaaacaaccatctaaaaatcgaagaacaatgaacatactgaacaacagaaacaagagaacatccatcttcaaggcggtggcgttatgcctgatagccgccgtgtcattcaccctcgtatcgtgcgacgacgacatggacattcaacagtcctatcccttcacggtggaggtcatgcccgtgccgaacaaggtgacaaaggggcagacggtggaaatccgctgtgagctgaaaaagaagggcgacttcgctaacacgctttacactatccgctattttcagtttgagggagaaggaaagttgaaaatggacaacggcatcaccttcctgcccaacgaccgctacctgctggagaacgggaagttccgtctgtactacacggcggagggtgaagaagcacacaacttcatcgtggtggtggaggacaacttcggcaactccttcgagttggaatttgacttcaacaaccggaatgtaaaggatgacggtttgaccatcgttcccatcggcaacttcagccccttgttgaaatgatgcgtgtattcatgataatgctctgttcgcttctggcggtctgttccgtatctgcacggaccagccgccaagaggaaacggacgggcaggcggcaatctaccgtctgccacttatggaacgggcttttttatgctgtcgctattttgagggctggcactcagaaaaacaccatccatacgtgggttggggtcacaaacttttgccaaacgagaagtattcagcacgaaccatgacaaaatgggacgcggatgaacttttgcggaaagacctgcgcaaatttgtcgccatgttccgtaaattcggagttgattcgactttgcttggcacgttagcttacaatgtgggaccggcgaagctgttaggcagcaagacactccccaaaagtaccttaatcaagaaattggaagctggcgacaggaacatttaccgtgagtatatcgccttctgcaactacaagggtaaacgccacgccatgctgctcaaacggagaaaagcggagtttgcgctgttgtatatcccataaatgtaaatagacaaaagaacctccgatgaaaccacaacttcatcggaggttttccggtttgttaaaattgaatttttacttctttctctttaatatgtatcacatctcccataatcgtcatagggcacattttcccattccaaggttcatcataacattcatctttatcatacttttctttttcacaaaacgaatgcaatgggcatacataaccatatttgtgcaatctcgttaaatatgaaaataatgcattgtgccctattagtgccaacatatcatcagataatttttcggaatctattgaggatgaaggtgtggattaaaatcgccactgtctgtatagctataaggcattcctaaaaaatctattaacgttttaattcgttccttagataagggttggtaatcagtaatcaaagttaagataggaacaaatcctttggcaggacgaattcgttccaaaacttcgccaatataatcgattccgactcggacacttttaaaaaagacttgtttgaatgtgtctataagagtatcaaaaaagtcacaaactgacattgcttttcccttgatgtatattttatcttcattgacgaaccgttcaaacaattctattgcagataaatccggattttcattcgcgtatgctaagttatctattagaacttcagcaggagaaaggctaaacaaagatatatagcaaatagttatcagttttatattatcagatgctattgcagaaaaatgttgttctgcaataatcttaattaaattatatgggaggtcaaattcttcatgagttgcagtttcatctatgagcatttgatacaatgctgccatactctccttaataatgttagcacccaaaacaatggtttgttttgaaccatccgtaaaactgatatctaatgttattattggtaaatttctattatttacctttttatagtttctatggatgcaaatccgttcacttacatctattttaaaattatttctccgtgtatctgaaagtgggcaatatcctgttccacattctacaatatccattttattcttcaatccttgagaataatcaatatttaatgggagagtgatagtagatgtagcattttctacaaaagcatatgtttccgccattatattatatcgaaccatactatcatatagtccccacggagttgatacattttgaagaaagtggatgtattcatgaacaagagttcctaatgttgggacatcaagttcatcgatgtttccatcaaaagaattgtgaatacgaatctgcataaacgccggctgatattcacctttactattatttcgttctgttatgatgtgcttttgacttattgttaattcacacataatattactatgattatgagtatcaatacttttacaaagatactcataatattttatatatcgctaacaagcgattgaaacaaaggtttctttgctactttctttgtccgccatcatgctcactgaaagaaagtagggcggctctcgccgcccctccactcaaaagcgtgtgtaaagtcccgtcaccatcgtgaacatttcctccaacatatcaaaatagatgccctcgtgtatggcaatgtcctttgttctgctctcgaatgtctttttgctgaatgtcctgcggtagaaacgcatattgtagaggtctgcccctgcatcatagatgatgtcaaggcggttggcacttgtcttgttccttgcaaggctcatccgtaagccgttgcccatatctatgaagtcacggcttcccgtcatggcggtgaagcgtcttccgcctatctgctgtaatatcgtctgtgctatcatatccgttgttttagggttttaagtgttggcggtgcggacaccgccaacttgttcaaaattctcgcatctcggcaatgggtgtctgtcgttgcagccactctttcacacactccatattatactcgctcgtgatgactgccgtatggctgtcggtggcggtgaaacgtgtgctttcgtaatcatctatccaccctttgagggtgttcgttccccacgcttgggcttcgtcaaagataccgtccaatgccgtgataggttcgctgaatttgactatcagcgtttgataggtcgtgttcatcggttgccctcctttccctgctttgcgttcagccacttgttccttgcggttcggcactcgtccaatgtgggtttgacacaagcgaacagttctccgtccgtatggcggtagtcgtactgcacaagtgtccgcttgcgtctgccgatacccgattggaaacgctcatatttctccgtacctgcttccgtacaggtgcttactccgttgatggtcattcgtgttgccataatgttgctttttagatgattaaaaatgtactgacagaactctgtccttcatcaccatttcggggttgctcgtgtagcgttgatgcaggtagaaatggtgtgagccgaagccgtaaaggaaaaacttgtcaagttcgtgcttctcggcaaactccttcacactccttctcaatccctcctcactcgttgtgagagtgaggagatttacaaattcaatgaacatcgtgggaattgcatcatcccacacacaaatcatgctttcgattcttacttccatatcaatgttgttttagggtttatgctatgccgctttcatccgctcacggataaggttggcgttcttgttcacaaggtctatgatgcgttcgtggtattcggtgtcttggttgtacttgccgtggcactgcaccaccttgagtgtccgcaaatccacctctacggtttcaattatctcaccgccaatccttgccgagagtatgagggtgtcggctttcttgtagtattcactgccgaacacgcagatgttctgtgccttgccctcgctgtaatactcgtctatgctttcaagcaccttgatgattatttcctcgtccgtgattaccaatccgaagaatttggatttgttggcgatgaaatcctccgcatctttttccctttgcagttgccgctgttgctcacgctcacgcctttcaatctcccagcggcggcgttgctctgctcgttccttctcgtgtatggtttcaatctttcgggttgcgttgtcgtgtgccgccatgaaatcttcggggcagatgttcttcgggttgcggaggtcttgaccgagtttgttgagcatacgcaaatagtcgcaccacatggagaagttgtctatcagatacttgtgacgcttggcaatcagatatgatgcccagcattcatcggcagtacgggcattgaaaataaagtgtttcataacctcaatctcaccgcctttcataagggtttcaattcttgggtcagaaagcaaggctttgaaaagacgcacgggggaaatgccgtggaaatcgcccttgaagccgttacgtctgagttgaggtaataccctcattttgggatatgcacagcttcttgccacaacatcatcgtataggctgttgtgcggtcttatctccatcgcgctgcacaatgcccatacatcgcagtaatagaatgtgaagccacggagcaacgccatgtctgtaaccttaccgtcgggtgaaatccaacgctgcacaacctcgtggcagtagaattgcatcggctcgcctttcctgctttcgcatctgacctgcgccacacggattacctgatagcctttgcagatggttatcacgctgaaatattgcgtttccttgtagatacgtttgcgtgtgtcctgcactttgagtttggcatggcattgggaacaggtgcaaccttcaagggtgtcgcatagtccactgtcactgtgccactcgtgaccgcagtcggagcaggtaatgttccctttcttggtgcggtagccgatatgttcaacgcagtggcggtatgcccattcaatttgtgtcgttgatatggggcggaggttggctgaaagtcttgccacctctttctgtatcttggtcttcggtttcataagcctaaatcaaataatgagggttgggggtggttttcttttctcgctgacggtctgttgcggttctgcaacttgcggagttcctcctcttggtatctgcggactgcattctgacgtgcctccgccttttcctcttccgtgagttccacaacatggttcaccaccacttggcagttcataggtttgcccacctctatctcgttttcctcatagtagtggatggcttgcccgaatatctctccgtccgtgaagccgttgcaaccacttttctgcacatggttcagaatgtgggtcacgcactcgtctatgttcttggcagggttgcggtacttcttcgcaaagagcgtatcttcctccgcccgctgttccagatacatttgtatcgttcttttgaaatggtctgttcctttcatatcgctgtcgtttttagattgtctgtttaagtatctctctccaataggtcggctctacctcgctgagaaggaagtccatgaagtccctccgtgcgtctttgtttagttcgtggtacaatcttcggaacgtttcaaaattgccgttgatgtacgtttccaccatatacacgaagatgttgtccacctcgtaatatctgcactgctgcgctaccgtcttgctgtttctctttgtcatgtcggtaagggttaaagagttaatgaccaaaggatgaagccgaagtaggcaatggtggaaaggatagccacgattacacctatcgccactcggaacactccgtttacaatctctctgatgatgccccaaaggatgccgaacaccccgaaggcggtgcgcatcatcaagccgcatatcgccaacccgatgtattgcgccacttgtctgaaatttgccgttgctgtcatatcttcgctgtttttaatttttttgttttttatgcggattcaagagctgagggagttgagtttcaaactatcttatctgcctctcgtttatccgacattttttttatgcgtctttctgtcgcatcggtcgttttcgtttcgggtgcttgaaaaggtagggattagggaatgcaaggtttttcggggaaatactacccgaagggctggagatttccgcagaaaacaggaggcttgaccttgctttcccgtccaatcccggaattacctttgcgcccagaacgaaaatgactgactgatgcggcttactgaaaggcgcaaaatggaggtaaacgaaaacagaggcagattaggtagaaaaaactttaggggaaaatccgtaaaaagaggaaaccgtctgaaagaaaaagacatcaccggaagcgtgaaaagggcaaaccacgacaaaggaagtatgattgtttccgttccgacggaacttgtccagccgggcggcaacaatcattcttcccggtttgtccggctgtgtgtgaccgcctgtttcattcatgaggcaggctgacacactctgcattcactttccgcttccggcaaaagggacagcaaaaaaagaaaaatcatctggtagcccgtaaaagcacctcttggcatagacgcaaaagaaaggggcattgcgtcatcagtctaaacatcgtttaggcgtgaggcaatgcccttttctccggctatgcggtagtcggcacacgattgttcaaaactcgtttttggcaatggtgttccgacaaacaaaaccgcttttacggaaaaatcttatgaatgaggggataaaaaacgggagtttatatcaaaatctcgaattaaatagctacttttgcataggaagagttctttgaaggttacgcaatgcgcagaaagataatgcagtagataactaactaaatcgtaacctattactatcaagagcaattaacctacgctcatttccaataaattacactcttttcgtaacttcttgagacaaacatacgaaaaaaatctaagttcctaaccaaacaataatttaaattcgacggctctttatttgttatctagctataatcttttatctttgtttcccgtcatggaataaaataaaaaggttattatgaaaacaaaaggatggattttaactgtaatttgtagtatgttgttattggtggcgggtatcacttttgcatcaatggtgcttgtcgggcaaccggctttggcaaacgaatcattgtggtggtggatcttgataaatcttggtgtgatggttttattattcgggtatggcgtgaaacggggaatccagatattgcgtatcttcagcataccgaaaagcaaactgacacgggaaccaggtgtcgtggtttgtgattataatatcagcctgaaaaagtatgctttgtataaattgtgggacatccgtcatttcagtttctctttgttgttcatcatttatatttgtattgcactgtgtacagggcactatattgttcccgaagagcaaagcctgttcagtccgctgctgatttggttcttgtgtcttatttatatcttgattatgctgcctgtcagactaaataagatttataagcggagtattgcggggcagacttgggtggaaataactccggaagggctgacatatgataaggcggaactgaaacagacattcccttgggaggagatagcaggtatagctctttataagacctattgctttctgtatgataaaagaggcggtgaatttttgattgtaacttcggatgaaaaggtgaaagaatcccttctttactatttaaatacgaaaaaataatgaattaaagctaagtgttttttatgataaggttgttcatattattataatgtgtatttttgtaacaaagtaataattgaaaaacctcttaagtatgaaaacacctgttctcgcgctattcatttctttagtggcatttggagcctgtgtgtccaataaacaaacccagccgtcaaccgattatacccaattggtgaatccgtttatcggaaccgattttaccggcaatacttatccgggagcgcaagcgcctttcggaatggtacaacttagtccggataacggtttgcccggatgggaccgtatttccggttatttttatccggacagtacgattgccggattcagtcatacccatttgtcgggaacgggagccggagacttgtatgatatctctttcatgcctgtaactttgccttatcaggaagcggaagctcctttaggtatctattccaaattctctcatgcggatgaagaggcttcagctggttattatcgcgtgttgctgaaagattatgatatcaatgtggagttaactgctacagagcgttgcggtatacagcgttatacgtttcctgaaggagagtcggctgtctttctgaatctgaagaaagcgatgaattgggactttaccaatgattcttatattgagataattgactcatgcaccattcagggatatcgtttttccgaaggatgggcaagaggccagcatgtgtatttccgcactcgtttctccaaaccgtttgcctcggtagagatggatactactgccattgctttgaaaggtaaacgtgtaggtacggcttatatcgcccgctttaattttgatacggaaaaaggagagcagattgttctgagtactgctctttcgggagtaagcatggaaggtgctgctaaaaacatggcggctgaagcacctcacaatgatttcgataaatatttggctgaaactaaagataattggaaccgtcagttgggaaaaatagaggtaacaggtgataacaaggacgataaggttaatttttatacagcattgtatcatacaatgattgccccgactatttacagtgatgtggacggggcttattatggtcccgataagaaaattcatcagacggatggttgggtgaattatggaactttttcattgtgggatacttatcgtgccgcacatccgttatttacttatacggaacctcagcgtgtcaatgatatggtgaaatcattcattgctttttatgaacagaacggacgtttgccggtatggaatttttggggaagtgaaacggatatgatgattggctaccacgctgtacctgttattgtcgatgcttatttgaaaggtattggtgattttgatgcagagaaggcattggaggcttgtgtggctactgctaacttggatgattatcgcggcattggtctgtataaaaaattaggatatataccttataatataaaggatgaatataatgcggaaaattggtcgctttccaaaacattagaatatgcttttgatgattattgcatagccgaaatggcccggaagatggggaggactcaattagcggacgaattctacaagcgttctcagaattatcgcaatgtgttcaatccggcgtcaagcttcatgcagccgatagatgataaaggagtattccaacctaatttcagcccggatgactacactgcccacatttgtgaaagtaacggttggcagtacttttggtctgtacagcaggatattaaggggctaattgccttgactggtggtaaggatcgttttacggaaaagttggatagtatgtttacttatatcccggctggtaatgcagatttgcctcttttcagtacaggtatgattggccagtatgctcatggtaatgagcctagccatcatgtgatttatttgtataataaggtacgtcagccttggaaaactcagaagtatgcggcgcaggtcatgcatgacctttatttcaatgcacctgccggactgtgtggaaatgaggattgtggacagatgtctgcctggtatgtattcagtgctatgggattttatcctgtcaatccggtaagtggtgaatatgagattggtacgccgttgttccccgagatacagatgcatctggataatggaaaaacgttcacagtactggcccctggagtaagtcgtgaaaatatctatatccagtcggtgaaagtaaatgggcaaccatacgataagagctatatcacacaccggcaaataatggatggtgctactgtagaatttgaaatgggtccggaaccgggaaatatttggtatagatagataataattggttcaacttattaagaattgtaattgtacaggaggtgagttaaaagtaatatttgttatcgttttgctgtagaggcggtttgaatctgcctgaaaattgtatgatgagcggaagctttctgcccctacagtggatgattggatcgttatttggaacattggctctctccttcatacaaaggtgaattatataatatgaacgaggaacttgatgacacctataaggccgtctttcgtcaatgctatcctaagctgttgttctatgcgacacggctggtcggtaccgaagaagccgaagatgtagtgcaggatgtttttgtggagttgtggaggcggagagattcagtcgtcataggagagcagattttagctttcctttatcgttctgtatataccaaggctataaatttattgaagcatcaggttatagagaataactacagtgcggcaatgatagagatctatgaacgaagattacaatattaccagccggatcatgctgaagttattaaaaagatagagaatcaggaattgcgtcaggaaatttttggagcgattaatgaattgccggataaatgtaaggaggtgtttaaactgagctatcttcatgatatgaaaaacaaggaaatcgctgatactcttggcatttctttacgtaccgtagaggcacatatgtataaggccttgaaatttttgcgcgaacgtctcagccatttattattgtcattgattatattttcagcaaaactgctaagtgtttttacaagttgaattgtttactatatgaatagggaaaaagatgagtaaacttaacgaagatattattatcaggtatttggaaaaccgatgctcggaggaggattttgttcttatcaatgaatggatgaaagaatctgatgagaatgccggagagctgttccgtatggaggagatttatcagttaggtaaattcccctttgaggaggaaaatctggtagtgagggcagagcgcaggttgggtagaagattggaacaggaaaatcaaaagaaacaagaggtgttcaagcttagaagtgtgttgcgttatgcagctgctatagtgggcgtgatggtgctggctgcgggattagcctattggttccggaataaagcggaggaattggtggtagcatcggctgctcatggacaagtgcgtgagatgttgttgcctgacgggacaaaagtatggttgaaccagtcgtctgttttaaaatatccgcgtgcttttgaaggaaaggaacgtcatgtatatctggatggagaagcttattttgaagtagcacgtaatcatgagaaacctttcatggtaaaaagcccggcaatggatgtcagggtcttgggaacctcttttaatataaaatgtcgtccggataacagttttgcggaaacaaccttgatagagggtgaagttgaggtaaaagataaatcggacaaaggaagaattactttgttgccgggacaaaaagccgttttaaacagggtaacagggcggatgcaagtaaaacaggtcgatcccaagatggagatagtctggcataatgacttgattccatttgaaaagtcatctattttccagattgcggcagcattggaacggttctatggagtgaagataatcctttcaccggatgtagacagtactaatacttattcaggtgtactgaaaaagaaagataatatagagtctgtgctgaattctttgcgtaactctattcctttcaattataagaaagtagatgataacaatatatttatctcatcggaaacaaaataatttttaaataaagatctatgaaaatcaacatgctcttaagcggctgtcttctagggttattgtgtttcactgcatgtgattctgagggcaatgaaatgaatgattacacccattatgtcaatccttttattggtacaggaggccatgggcatactcatccgggtgctatggttcctcatggcatgatacagccggggccggatactcgtattgacggttgggattcctgttccggatattattatgaagatactacgatcaatggttttgcccatacacgtcttagtggtacagggtgtgcggatttcggagatttcctgttgatgccgactgtaggtgtgcagcgtactgatttcttgggaacagaaagccagaagcgtcctttcgcatcggctttttctcatgaaaaggaatatgccgaaccgggatattattctgtttttctggatacatacggggtaaaagccgaactgacttcgacagagcgtgcggcaatgcatcggtatacttttccggaaagtaaggagtctggatttatcttggatatggactataatattcagcaacaaatcaatcaggtaatggaagtggaggcagtgaatgatactgtgttgcgggggcgcaaacgcagtgcctattgggcataccgacaggatctttatttttatgccgtattttccaaaccctttacgtataccttgtacacggatactgttcaggaaaatgacaaacagattcctgtatgtaaaatgcttttgcattttgaaacggcgaaagatgaacaagtgctggctaagttctctatctcttctgttgatgcggaaggtgcttataagaacctccaggctgagatgcccggttggaattttgatggagtgcgtgccgatgctaagaagaaatggaatgaatgcttgtcaaagattgcagtcaaaaccaatgatgaagaccagcgtgccattttctatacggctatgtatcatgctttcctaagtcccaatctgtttacagatgtagacgggcgttacttgggaatggatttgaaagtgcataccaccgacatgaaacatccggtttataccattttctctttgtgggatactttccgtgcgttacatccgttactgactattgtcgatcctcagttgaatacggagtttatccgttcattaataaagaagcatcaggaaggtggtatctttccgaaatgggactgtgtgtccaattataccggaactatggtgggatatcatgcggcttcgttggtaaccgatttttatgtgaagggataccgcgattttgatgtgcaggaagcttacaaggcatgtctgcgtgcagcggaatatgacactaccggtattgtagctcccgattggctgattccatatgttatgcccaaagcacgttattataagaatactcttggctatattccatgtgaccgtgagaatgaatcggtggcgaaagcattggagtatgcgtatgatgactggtgtatctccgtgctggcagacagcttgggagatactgaaaccaaggagaagtatgcccgttttgcagatgcttacgaattttattttgatcctgccacccgtttcatgcgtggattggatagtaaaggtgaatggcgtactccgttcaatccccgttcttccaatcaccgtaatgatgattattgcgagggtactgcatggcaatggacttggtttgttccgcatgatatcccgggactggtgaatttgatgggtggggaggatgctttcgtaggaaagctggactccttgtttacggtttcttcccagttggaaggggaggctacctctgctgatatcacaggactgataggccagtatgcgcatggcaatgagcctagtcatcacattactcatatgtataactatgtaaaccgtccatggcgtactcaggaattggttgacagtgtgctgtataaccagtatttcaatgctcctgacggcttgtcgggtaatgaagattgcggtcagatgtctgcctggtatattttgaattccatgggcttctatcaggtatgtcccggtaagccggtttattctatcggacgtccgttgtttgaggaggtgacgattaatttacccgaccgcaagactttcgttatccgtacccacaataattcgaagaccaataagtatattgagtcggttttgttgaacggaaaaccgctggatgttcctttctttacccatgatgatctggtacgtggaggaacgatggagattaccatgagtcccgtaccgacggaatggggaaaacaggtgaagaattaaaagtataacttaacccaaatagcaatatcatgaaaaaactatttctatcagttgtagcgctgtgtgtcacgctgtttgtacaggcaaaggattatgcagactatgtgagtccgttggtaggtacacagtcttcctttgaactctctacaggaaatacttatcctgccatatcccgcccgtggggtatgaatttctggactccccagacaggaaagatgggggacggatggcagtatgtttatatggctaataaaatccgtggtttcaaacaaacccatcagcccagtccgtggattaatgactatggtcaattttccatcatgcccgtaacaggaaaaccggaatttgaagaggacaagcgtgcaagttggttctctcataaagctgaaattgcaaaaccttattattataaggtttatttggcagaacatgatgtcgtaaccgaaatggttcctacggagcgtgccgtaatgttccgtttcacttttcctgagaatgattcatatgtagtggtggatgcttttgatcgtggttcgtctgtcaaggtgattcccggagaaaacaaaatcgtgggctatactacccgtaacagtggtggtgttcctgccaactttaagaattatttcgttattgagtttgataagccgtttacttatgaggctacgttctctaatgatgtacagcctgaaaaaccggatggcagtgttcctgtaaccttgaaagaaggtaaactggagcagactgatttccataccggagccgttatcggtttcaagacaaagaaaggtgaagtagttcatgcccgtgtggcctcttcattcatcagtcctgaacaagcaattcggaacctgaaggaattgggtggtgacagttttgaagtattggtacagaaaggtaaagaggcttggaatgaggccttaggtaaagtagaggtggaaggtggaacattggatcaataccgcactttctattcctgcttgtaccgttccttgttgtttccgcgtaaattctatgaactggatgccaacggacaacctgttcattacagtccttacaatggcgaaacgctgccgggatatatgtatacggatacaggtttctgggatacattccgttgcttgttccctttcttgaacctgatgtatccttcggtaaataaggagatacaggaaggtttggttaatacttataaggaaagcggtttcttccccgaatgggccagccccggtcatcgtggttgcatggtcggcaataattcagcttctatcttggtcgatgcttatctgaaaggagtacgtgtggaagatgtggaaacattatacaaaggactgattcatggaacggaagccgtacatcctgaagtttcttctaccggacgtctgggatatgaatattataacaagctgggctatgtgccttgtgatgtgaagattcatgagaatgcagcccgtacattggaatatgcatacgatgactggtgtatttatcagctggcgaaagagttgaagcgtccgaagaaggaaatcgcactttttgccaaacgtgccatgaactataagaacctgtttgattcggaaagtaaattgatgcgtggcaagcagaaggacggcaagttcgctcctgaattctcgccgttgaaatggggaggtgactttacggaaggaaacagctggcattattcctggtctgtattccatgaccctcagggattgattgatttgatgggaggtaaggaaatgttcgttaccatgcttgattctgtcttttcggttccccccatctttgatgatagctattacggacaggtaattcatgagattcgtgaaatgacagtcatgaacatgggtaactatgcacatggaaaccagcccatccagcacatgatttatctgtatgactatgcaggccagccttggaaagcgcaatattggttgcgtgaggtgatgaaccgtatgtatacagccggtccggacggatattgcggtgatgaagacaatggtcagacttcggcatggtatgtattctccgcattagggttctatccggtatgtcccggtacggatgagtatattctgggtgctccgttgttcaagaaggcgacacttcattttgaaaacggaaagaacttggtaataaccgcatcggataacagcgataccaaccgatatgtagatgaaatgcgtgtaaacggtactgtttataccaagaattatttgaagcataacgaattgttacaaggcggtactattgacttcaagatgaccgaccgtccgaatatgcagcgtggaacacaagaaagtgatttgccttattcattttcaaaagacgaaaaagtaaaataaaagtttcaccatgcacttctctcttataaagagaggttggagggggatgttctcttttggcagcattgcaagagtacatcccctttttctttttaagtatttcttctatacgtcaaagtccgatgatattactacttttgcctttcctctgcttttttctggaaaatttagaaaaaagaacaagattgagtaagtgttttcttttagctgcctgtttttattctcgaaaggggaatgagaaccccttcactggagaaaaacaagtcagtgttaacgaatttataaattatgaaaggcaatcaattaatgagaaagcccaaattactcagggcgcttttgattcttttgtttgtggctgcacccatacaatggacccgcgcgcaaatcgttctttcaactcccaagacaacgcttggagcagtgatcaagaacattaaatcacagtctaactatcagtttttctatgatgacaagctggctgaaatgccggtgaatgccattgatgtgaagaacggttcattacagtctgtacttgatgcggctttgcaaggcaaaggaattacgtataagatagaggataacattgtctatctttcagcatccggagagcctcagacacctcaacagacaggacaggaacatacagtgaccggaacagtggttgatgcgacaggcgaagccttgattggtgtaaacgtacaagtgaaaggaaatcccacagccggtacgattacagactttgaaggtaactattctttgtccgttcccggaaatggtgagattgtgttctcatacattggttaccgttcggaaacattgaagcccgatggcaagaatgtactgaatgtaaccatgcaggaagatacacagcagattggcgaagtggtggtaaccgctttggggatcaaacgtgagaagaaaatgttgggttatgcggttcaggaactgaagagcgatgaactgaacaagacaggtgacccctcggtaaccagtgccttgcagggcaaggtggcaggccttcagatgaatacctcggctaccggtctgggcggctctacgaagattaccatccgtggaaactcttctctgacagacaataaccagccgttgtggattgtggatggcgttcctttcagcgacactagcacttcaagcgcatcccgctatgatggtgtagaccgtggtagcgcttccatggacattaatccggatgatatcgagagtatttctgttttgaagggtccgaatgcggctgctctttacggttcacgtgcaggtaatggcgttatcttgattacgacaaagaaaggtagtaagaaggatggcttcggaatccgttatagtggtaattttacttggacagctatcggcgagacattggatatgcaacgccgttacggacaaggacatattgatacaaaagatgccaagactgcggtgtatgacaaaacggatagcggaagctggggtccggtattggatggaagcatgaaagaggcttggaacggagaaacttacgcttactctaactatggggataagttgaaagattattttgataccggtttctcgcatacgcataacgtatctatcagcaacggtacagagaaatcacattttcgtacttctttcggatactccgacaatgacggtgtattccccactgaaagtttgagccgtgtgaatgccgatctgaatgcaggaacggaattgaacaaatgggtgtctatggacggaaaaatttctctttcacgtacaaaagccgataaccgtccactgtatggagattacggtgctatttcccagttgatgagaatccctaacaacgtccgtctggatgacttgaaacaatattctgatgaaactcatgcgcatgtgaattggacagggcctactgccagtatccgtaatccttattatgtattgcatcagcgtcagaattcggatgaacgttggcgtgctttcggatattatagcatgaaaatcaatttcactgattggctgcatctatctgccaaatacgcttttgactactaccgcaccagagtgcaaagcaccaatgcgggggatggtatcaatggagaagccaatacttccatgattacgaatgattcaatggaccgtagtgaagaaaacttcttcgagtcaaatgctgaagtcattttgatgggtgaccgtcagttgactgataacttccgtctgggcttcaatgtcggtggtaactttatgtaccagcgttcggaaactttgggcgtgggcgtaggtaatatggtggacaaaggtaactggatgctgaatgcggccaatttgttgagaaccggtagtgaggatggctacaagcgtgccatgaactcggtgttcggctctgtacagatggcgtggaaggaatatctgtctttggatttgacagcccgtaacgactggtcatccactcttccgtcaggtaacaattctttcttctatccgtctgccaacctcagtttcgtagtgtcggacttcttgcgctctatcgacaaaccgttgccaagctgggtgacatttgccaaggcacgtctgtctgccgcacaggtaggtaaggatacaagtccttatcagttatacaacacctactctttcaaattcgataatggtgtattgaccccgaccaaagacaatgtgaagatgaacgaccagttgaagcctgaaatcgcgacttcttacgaagcgggtctggatatgaagttcttgaacaatcgcctgggatttgattttacttattattacagcaagacaaagaaccagattatgaaagtacccgcagcagctccctggagtggaggacaatgggtaaatgcaggtatggtaaccaatcaaggcgtggaactgatgttgtattccactctggtagaaacaaaggatttcgcttttgacttgaatgtgaatatggctcacaacgtatcgaaggtgaaagaactggctccggaagaaaatgtgaactatatgttctttaacggtgacggaaacttccctgtaaaagtaggtacacgcgccggacacaaattaggcgagatttatgctacgtcgctttataagcgcaatgaaaacggtgatattatcgtaaatgaaaatgggttgcccatgactgtgaccaatgagtccgaatatgtgaacaaacctatcggtaatatccagccaaagctgaccatgtctgtatctcctacctttacttataaggggattacactgtccgcactgtttgatatgaaattcggtggtgatatcttctcttattccgagatgctggctaccggaaacggtttggctaaacgtaccttgaaccgtggtgaggaaaacaactatatgatggtattccccggtgtgacagagtcaggcgaggtgaatacaaaacaggtgtccgcttcagaatactatggtgcattgcaggctgaggatttcatctacgatgcttctttcattaagctgaaagaattgtcaatcggctattcattcccctcatctatgctgaagaagactcctgtcaactcgctgaatgtttcatttgtagcacgtaacttgtgctatctgatgaagcacacaccgggtacaagccccgaaggtggctatgacactacgatgttctcacaagccattgactatgcatcgttgccgtttacacgtactttcggtatttctatcaacttaggtttctaattaattaaaaggaaaaactgattatgaaaatcaaattatataaatccgtagccttatgttcgttgctggctttggccggatgccatgattttgaggaattgaatacaaatccttacgcaccgatttacgacccgactgtggagaatgtatcggccgacggtatagatattgattatactttgacggaacatgccatggcaagtttgaaagggatggaaggtgctatcggaagtatttttgccaatttcacctacgaaggtccttacaatgattatcagacaacaaccaatctgactcatgatatctatgccggttattggggaaacaatgtcagcggctttgtgaatcaggcgcctacctattcttatacggatggatggtcggccagccgctggaagcatttctatgatgaccgcagcacttcggaatacagccagttggtcaagacattctatttctgcaataaggattattaccatacggcattctatatcacccgtatttattatgctttcttgttgtccatgcagacggacacttacggagatattcctgtagcctactatgtgaagggagccatgccaccggaagaaaatgtgacctatacacctcaaaaggaagtttataatatccttttccagctgttggatcaggcaataacagagttgcatcaggaaaatcttcctgctgtcagtcagtatgatttaggtgacaatgacaaatgttatgggggtgatgtggacaaatggcgtcgttttgccaatacactgcgtttgcgccttgctttgcgtgtatccaatgtagacccggctttggcccagactcaggcaaaggcggctttgacagaccctgccggtttgatgcaaagtcaggatgacaatatgaagcagactccgaaacgtcagtatatcgccggcggtaatgaaaatatctacgcgttgttgttcagttggaccggcaatgctgtattgtcgaaagaaatggaacgggcttataagaatcaggctttgaaagaaggtgcggcagccgatgccgttactttcaatgagaattctgagaactgttatctcgaccctcgttgtgaagttttatggttccgtcctactccgtttgattcgttgactaccagtccgcttcctacagagaatctgaagagagatttcaacggagtgatgaatggagaaaccaatgtaggcggttcttatctgaacagatattctgccaatcgctgtattctgtcatctgatgccatgaacaaggattattggtggaatctggctcgtgaaattgtctggatgggttatgctgaaagcttgttcctgaaagcggaagcggcattgcgctggccgtcattggtggatgaaacagccgaagccctttatttgaaaggtatcaaggcatctatggattattatgaaattgatgcggacaaggccaatgaatacatcagtcatctggatggcgtaaaagcatttgccggtggtagcaaggaagaacagttggaacagattattactcagaagtggattgccgttttcccgaatggaaatgaaggatgggcggaagtgcgccgtaccgactatccgcgttatctgctggctccggtcaatggaaacaattccaatggagaagtggcatccggcaagcttatcaaacgcatcaactatcctaacagcgagtcccgtaaccccaataaaccgggcaatgtgaaccagggtagccgtgtatggtgggatgtgaccgatacgatgaatgatagaggtcagtggcatactccgaataatttccgctagaaattgctatctttgtatcctagggaacataaaaagaaacaaaatgaagcaaattctatttttattggcagccgtcctgttattgggcggctgtgcggaagagaagaagaccgacgttcgttgggctactttcaatatccgttacgacaatccgcaggacagtttgaacaattggcaatatcggaaagaccgtgtgtgccagtttattaaggaccatgagctggatattgtcggtatgcaggaagtcttgcataaccagtttcaggatcttcgcgcaggcttgcccgaatacgatggtatcggtgtgggacgtgatgacgggaagacagcaggtgaatatgcgccgcttttctatcgtaaggacaaatatgaggtgttggactccaatactttctggttggccgaaaatcccgatagcgtaggaatgatgggatgggatgcggtttgtgtccgtatcgccacttgggcaaaatttaaggacaaggctaccggaaagatattcatggctgtcaatactcattttgaccatgtgggtgaagaggcccgccgtcaaagcgcattgctcattatccgtaagataaaagagatcgtaggcgaacgtcccgcagtggttacgggcgactttaatgtgaccgatgcgagcgatgcatacgaaacaatcaccaccaacgagtttgtgatgaaggatgcttataagacggctgcccgtgtgaccggcgttgattatacttttcatgattttgcccgtatcccggccgaggattgtgaaaagattgatttcatctttgtcactccgcaagttctggtgaagagttgtgaaataccggctgaagtaccggaagctttactttccgaccataatcctcagttggctgacttggaattctgattttttaaataggtgaacttacgccggtagagtctttaaaagggctttatcggcgtttgttattttattctgttgatacttctcattatatgtaatcttctcccatttaaaataattttcctccttcgataagtgtgataccttacttaattgttctatatttgtatcattaatccaatttaatagtatgaagacatacagttactatgtattatttttgttagttgtgttttgcggatgttcccgtcccacggaattaacatcgccggatggcaatataaaattagtattcaacctgaatgaggcaggagcgatgacctatggagtttctgtaggaggaaaaccgttcatcactccttctgttatgggctttgaaggccgtgacgggctcaatctctccaaagattttcagatagaaaatactgagtttaccacaaaggatgaaacctggacccagccttggggggagaataaatctatccggaaccattataacgagatggctgtgcgcctgaaagatccggcgaatacacggctgaccctccgtttccgcgtgttcgacgacggtctgggctttcgttatgaatatcaagtaccccaagtggacagtgtgttcgtgatggacgagctcacttcattcaatctggcgcaggatggcaagtcatggtctattcccgccagttttgaaacctacgagttgctgtatcgtaccctgcccgtcagcaaggtggataatgccaacaccccgatgactttcaaaacagataacggggtatatgccagtattcacgaagcggctttgaccgatttccccgaaatgactttgaagcataccgaaggttgtcacttcaaatcggaactggcctcctggcccgatggggtaaaagcccgttttgccggaggaactttcgttactccgtggcgcagtatccagatagctcccaaagcggtaggtctgataaactccggcctgatactgaatctgaatgaaccttgtgcgctggagggtgatttgagctggatacgtcctatgaaatacgtaggtatctggtggggaatgcatctgggggttgaaacgtggacgatggatgaacgccacggcgctaccaccgctaatgccaaacgatatatagattttgctgctgccaataacatagaagcggtgatgttcgagggctggaatgaaggctgggaaagttggggcggtatgcagacttttgactataccaagccttatgccgatttcgatatggcagaggtggcacgttatgccaaggagaaagggattgaaataatcggtcaccacgaaacgggtggcaatatctttaattacgaacgccagctggacaatgcttacaaatggtatgcagacctgggagtgcacagcgtgaagaccggttatgccggaggactgccgggcggtcacagccatcatggacagttcaatgtacgccattaccgcaaggtggtgcagactgccgccggttatcatacaaccgttaatgtccacgaacctatcaaagatacaggaattcgtcgtacttaccccaatatgatgacgcgcgaaggcgcccgcggcatggagtggaacggatggagtgaaggtaatccccccgaacatcacgagttattgccgtttacccgcttgctgggcggtccgatggattatacaccgggtacttttgatattctttatgaaaagacacgcaattccccacgccgcaagaagtggaatgacttggataaaggaaacagccgtgtgaataccaccttggcaaagcagatagccaattgggttgtcatttattctccgttgcagatggcttcggatatgattgagaactatgaagggcatcctgccttccagttcttccgggattttgatgcggactgtgactggtccgaagccttgcagggcgaaccgggagagtttgtagctgtggtgcggaaagcgaaagataaatatttcctgggagccaccacgaatgaagagtcgcgtacactcaccattccattggatttcctggagaaagataaaaaataccatgccgtgatttatgctgatggagaagatgccgactggaaaacgaatcctacttcgtatcagattaaggacaaagaggtgacagcagccgataccttgtctgtagtcatggcaaaaggtggtggacaagcggtgagctttattcctataactgactgatttaccaaatgcttcgtcctattgcgtttatagattccgaaaggtaacttcatctccttctgaaaggggatgaagttatcttcggttatagccgaattcaacaaccttaatacttagatataaatgaaaacaaccgaaaccccaactccggccagacgccgtagtcctattttttgggttcccaccgcttattttggtatggggctcccttttgttgtcctcaatatggtagctgtactgatgtacaaaggtctgggagtcagtgatgcgaaaatagccttctggacctcccttatcatgcttccctggacattgaaacccctttggagcccgctactcgaaatgtaccgtaccaagaaattctttgtcgtcctcacccagatggtgtcgggagtcactttcgggttgattgccttgtcgcttcatcttccgtccttttttgcaatcactatcgccttgttcgccattgtcgcctttagcggggcaacgcacgatgtggcctgtgacggggtatatatggacgagttgaatgcacaggaacaggctaagtatataggttggcaaggtgctttttataacgtagccaagattatcggtacaggtctgctggtttatctggccggtttcttgaaagatgaatacgaaggtcctgccgaagatgcggtactctattcctggacggtcattatgattgtcctcggaggagtgatgttcgctttgggactttatcatacccgtatgctgccttcgggcaagcatgcccattcggtcacctctttttcgcagagtatggccgagttatggaatgtcatccggaacttctttactaaaaagcatatcgtttattacatctgctttattattttatatcgttttgccgaagggtttgtgatgaaaattgtacctttgttcctgaaagccggtcgtgatgtgggcggtttgggattgacagaacaggagattggcatttattacggaaccttcggagcggcagctttcgtactcggttcattgctgggcggatattatatttccgcacgtggattgaaaaagactttgttctccttgtgttgtgtattcaatctgccttttatggcttacacgctgcttgccattttccaaccgcagagtgcgcctcttatcggcggagccattgtgctggagtatttcggatatggcttcggctttgtgggacttaccttgttcatgatgcaacaggtggctgccggccctcatcagatggcgcattatgcttttgcatcgggtatcatgaacctgggtgtcatgttgcccggtatgatgtccggatatgtcagcgactggctgggctataaactgtttttcatctttgtgctggtggctgccattccggcattcctgatgacttggtttgtacccttcacgcacgaagacaagaaatagagaaaaactattaacctaacaaaaaagagaatatgagtgaattgaagattgcgggcaatccgttgcccggtatgccgtgggaggaacgtcccgaaggttgtaaaaatgtaatgtggagatgtagcgcgaatcccatcattccccgtgatttgctgcctacatccaatagtatattcaatagtgcggtagtacctttcggcgaagggtatgccggagtgttccgttgtgatgatacaaaccgccggatggcgcttcatgtgggattcagcaaggacgccgttcattgggacatcaatccggagaagttgcagttccagtgtgatattcctgagattggtgaatgggtgtacggttatgacccgcgtgtctgctttatcgacgaccgttactatgtgacctggtgtaacggatataagggccagcccaccatcggcgtggcatggactacggatttcaagacattccatcaagtggagaatgctttcctgcctttcaaccgtaatggcgtgctgtttccccgcaagatcaatggtaagtttgccatgttgagccgtcccagtgataacgggcatactcctttcggagatatttattatagcgagtcgcccgacttggagttttggggacaccatcgtcacgtcatgtcacccgcgccttttgaagtaagtgcatggcagtgcctgaagattggcgccggccccattcccatcgaaaccagtgagggctggttgctgttctatcacggtgtgcttcgctcctgcaacggttatgtctatgcctttggatcggcattgcttgacttggacgagccctggaaggtgaaattccgttcgggaccttatcttatctctccgcgtgaaccttacgaatgcatgggtgatgtgcccaatgtatgcttcccttgtgcggctttgcatgatccggcaacgggacgggtggccgtttattatggttgtgccgacacggtgaccggtctggcattcggttatattcccgaaattatagaatttaccaaacgtacttctattatttaagcaccgtttgtactgttctcattcgaaaacagaggatgtgtcctgtggctgtcacttcggtccggacacatcctctttgtctttttccgggaaaggggactgtctggttataaagcggcttttaagtgctgtcttctctttggctaagcgttttcttccggatgattaagggcttttatactgaaaccttctacagtccattgcaatggactgtagagtctgccgtaatggactgtacggtctgctacagtggactgtacggtctgcaccggaagactatagaagataataggaataaagaccttagttgtatggagaaaaaggcttatgtttgctgttgaaagaggttaggttccgatacggaaagatatcagaccggtataccggcaaattattcacaggcagtcctccgcctctcgatttttctctttatctttgccggaaaaataaagcagtccatgaaacgacccaacgtacttaatttaacctgccctgccatccccgtagttcggatcggttttgtcggattaggaaacaggggcattcttgcacttgagagatatatgcacctggaaggcattgaggtgaaagcactttgtgatttgcggaaagagaatatagagcgtgcagagcatatcttacgggagttcggccgtcccgaagccgagaactattcggaagaagggatgtggcgcaagatgtgcgaatgcaaggagatagacctcatttatatttgtacggactggctgactcatactgatattgccgtttatgccttgcagcagggccgtcacgtggcgttggaggttcctgccgccatgagtgtggccgattgctggcgtttggtggatacagccgaagaaacccgccgtcactgcatgatgctggagaactgttgttacgatgcatttgccctgactacattgaacatggtgcagcagggggtgttgggcgaaatcactcatgccgagggggcatacatccatgacttgcgcaagcattattttgcagacgaaaaagcgggtgggtatcacaatcactggataaagctttacagccagcagcatacggggaatccttatcctactcacggcttgggtcctgtctgccaatggatgaatattcatcggggagaccgtatggagtatctggtttccatgtcctcgcgtcaggccggtctgtctgcttatgccggacaggtgtttggcgcatcctccgaagaagcggcgcagagttatgagatgggggatgtgaataccacgctgattcataccgcaaaaggaagaactatcttgttgcaatatgatgtgaccactcctcgcccgtacagccgccatcagacggtgtgcggcacgaagggattcatgcagaaatatcctgttccctgtcttctgctcgatgaatatggcaaggaacctttgtccggtgagcagtttgagcggatgatggagcagtataaacatccttttacggcagttatcggcgaggaggcgcggcggaagaatatgccgaatgagatgaattatatcatggactaccggcttattcattgtttgaggaacggtttgccgttggatcaggatgtgtatgacgctgccgaatggtcctgcattacggaactgagcgagcgctccgtgcgacagggcagtgtaccggtggagattcccgatttcacacgagggaactggaaagagagatagtgctgtcagttctttagcacaggggggataaactgaatggttctcacctgaagatgaaaagaacgctgatatgttaatctccaggtgaaaatacaggcttgtttattgaactcccattgatgttatcgtttcttgtcttgtggtgtttccactattatttttccttctttcatggtgaactgtgcgattttcaaatcattcaaggcgtccagtacggtattcaccggaagttggcggttgatatggaaatagatgcgttcgtccagtaacggacgtgaacggaatacgatgctgatgttataccatgaacctatatcttgcatgacttgcctcaagtcggtattgtcaaaagaaaattcattctccgcccatccttttctcttctccgtatcaactcttttcaattggagttttccttgtttatccaaggatatttgttcccccgggtgcatttccttactttgattgcgcttggtatgacttacattcactcgtccttgatagaggatgacatccggcgagtaacggggataggctttcacatcgaacaccgttcccagtactcgtgtttgtagttgctcggtgcatactataaaggggcgggaagcgtctttggctacttcaaaacgggcctctccgcttagtttgacactgcgaatggtatctgtaaactcctttagatactccagacggctgtttgcgctgagcaataccttgcttccgtcgcttaattgaacggaggtaatggtagcgggcggggtgcttacaattatccttttcccttcttcccgaaaagtaatttcctcaggaacttccagtgaagtgaagacttccacttcctgcggctcaggttgcagtaaaggctggaatacaagtaccaaggcgatgacagcggcggctatacctggtatcgttatccgtcggatagattggtgtctgatacggtgacgacggatgaatgtctgccaggctttccgggtttcgtctgcggtgggaatatcccccaatgcttcaccaaagagttgttccaattgatggtcattccaagttccgttttggggggagtcttggttatggggattctttccgttgtccggatggatgtggtcatttgttgaaaactcctttttcattgtttatcctcctttttcagtatcgcttcgcgcagagtccgcaatgcttttgatatatgttttttcacggtgtcggggctgattcccaattcgtcggctacctgttgatatgtttttttctcccaatagcagcttcgcaagatggtgcaagtcggttcgggcaaactgcgggctatgttttccgcttgctgcaacagtgcctcgtgtgcgcggtaaccctgattcatttccgcacgggtggcttcgatgaggcggtctatgtgttgctgttccacattcaaatgcttcaagcggttgaggcatccgttacgcacggtggcatagagccaggcgctacgggtgttttcctttagttggtcgaactccttccaggcttgttccatggtttcgcttactatgtccttggcttcttccgtattgctcatcagggtggtagcaaagcggacgaggcgtgggtacatttctgcgaacagtcgttcgaagtgctcttctttatggtttcttctcctgaataaaatctgcatgtttccttgtcttccgtgaacaaaggtacggaaatttccttttctccgctggggttacagacgattcttttcgctttgtccggctccggttcctttatatttgctcttggtggcattgaatttataggatacttggaggccgaagcgttggaaatcccggtaaatccgattttccatataggcatctatgccgtataaatcaaaatggaaataccctgttctaagaatatcattggcggtgaatgttatggtgagtgtctcttttaaaaaggatttggaaaggcgtgcattgatttgtccttccgtgcgcgttacaaaaaatccttgccgggaagcggtggagagatatccttccatattgaagaaccagcctttgggaaggttgaagttgttgtccagactgatatagaaacggggttggttccggtgttcggtgattcctattttattcgcattcatgtccaaaaaagccatattcacattgagttgtggttcccaacaccccagtttgggagaggcgttgaaactaatgccgtaattatgggttgtaggaatggtctgtgtggcaaataagaggacgcccggatgtgtatcttccttgtagggcataattatattggtatacatattgagaatacggctgaaataggctgagaaatagagccaattccaagaggcgccggccgaaaagcgatgcgtcttttgggttttcagcaaagggtttccttgagaatactcatatttgctgcgatagcggatggaattggtcaataggctataatcggggttatttttacgtaaccggtaagagaggctgaaacttttgccattgtgtgaccaactggcggccaatacaggaataatatcattataggtagggctttgtgcatctatccttatccctttttcataataatctgtttgttgatgttcataacgtattcccatattcagtttccaatggcggatggatcttgaatagtcagcaaatgcggcatatacggattgtttgatgtggtcgtcggcatcagcagagaaaccgttttgggtaaagatatcatggcggttggtaaaagtttcttccgtaccgaatgaaaaacgtccgttccataaaggggcactgactaccagcttggcggcatagagggagctgcgcatgcgactgtctgcttgcacggttgcatcgtcattattcatggcgttctggtcggaatgcgagcgtttgaacaggtaatcggcgttgaagtcaatattccatttgcccagttctcctgcgtagtaggcgtttgccgcgtgatcccaacctgtatgtatttgttctgctgtagtaaagtttatccggtcggtttcttcatcgttacgtctggtgacggttttaccggatgaatttctgtctgcattccctattccggtttcgggcatatagcgcagaccgaaagaatggtgttcatccggttcataattgaatcccagctcaccggaaaaacgttggctcttatgggtctgcacatcatttttgttggtttgccaaatggcggaacccttgatgcggttcatatttgtggtttttccatacgagttttgctgtgccatatatccctttacaaagagatccagaccgccggtgcgataatttaatgccatatattcgttggcgttggcggaatgtccttgtgaataagtcgtattgaagtggccgctcaacccttgtccgcgccggcggatggtgcggaggcggatgacggctgctacgtccgaggcatattcggctccgggagtggtgatgacttctgcggataagatttcgttggcccggatacggtccagttctgtcatgtcacgtactttcttattatttatatagattacaggagaaccgcatcccattacattgtattcgccgttatggccggtgacgaaaggaagatggggcaacatttctgcggcagaccccattcgggccagggaagttcctgccacgttggcttttagtccgttgggacccacttctatcatggggcgtcgggcgctgatggttacttcctgcatcagttgggtgtcgggaagcaggtgaaacgtaagagtagggtggtaaggttgcacttccgtcttatagcctatataagaaacccgtatcaagtaaggtatcccttcttccgctatcatcaggaaacttccgtcttcacgggtgacacatccgtttacaaaggtggagtcgccgggagtcaataagagtacattggagtagggcagcggttcattcttttcattggttacttgtcctcgtatttcggtaatgcgtatgtctcttccctttttctgtatggcgaagtattcttcccgttctttacaaatgaaaggaatgccgttcaggacagtgccgatggcttcaagttcggtcttttgccggatggaggctgtaacccggtagctttctgtttcgttataggagaagataatattctttccgccttccttttcgattagtttaagggcggcgggaagtggtttgtcctttaattctatagagaattgccggggtgtttgtgaatgaagcggaaggatgatgctgaataatacggtcatgatccacgctgttttcaaatagccgtctggtctcattttactagtgtttaattgttctttatgagtaatacaaccgaggtttgtaatcgggtacggtaaaataaggaaaaagattcgatgggttgccggaatggattcccgtggttggttcatgcgaagggaacggatataactttatgaagaatttatgaaggattggaataagaatggttcattgtaatggcttgaggttcaaaacattgtccgcgtatgaagaatttgaaggaaaaaaggtggaaaatgtgttttgaagagatggttggggcagatacttgtgtgatacttgttttatgaaaattgtagatggcagtagctatgaagaacagagggaataaaaacaaggtgactgaaaacaaatccagccaccttgtttttattgtttaacctgtgttttattctatctcgacgctatgttttaccggagtcaggatgaaagtaaattcataatcaccgtagggcaacatatattgaggcaacggcagagctccccagctgtttacacaacctaatcccatctgagccttgtcgatgatcaggttggtcaggtctgctttctgtacttcgggcgagtgacgctggtctttttgttcgccatcatccagtgaacagatggtataatgcaaagcggatgcagagaatggagcatcacctactaccttcagtccgttaccgccggcattcagttgcttccaccagcggatatcggtcttggttcctgtttcctgcggacggatataggagtagaattgttcatccacactctggcgataaatacccaagtcggtgctgtggttgcggtcactgtagttttctaccggaccacgaccataatattctacggtttcaaaacatttaggcatctgcatttgcataccgaagcggaacatcggagatactttggcattcttgtcggctgtcatcttttgggtcactttgatggctccttcgttgttgatgacataagtcagatataatttggcggaaacattcttcatgtcatattccgcattcactactatctggtcattttctgtcttggaattcaaggaaaccagtttcaatcccgggtttttccatgcggcatatctgttttgcaggccggctcccatatcattgtctgtcggggcacgccagaagttaggggtcagggctgcgccttctttcagcatttccgttccgtccactgcatatttgcttaagtaaccgttctgtttgttgaactcggctacgaagttattgccttttacgatcagataatgatattggttgtcgatgatttgcggaacaacggtggctacattggtcgtttccacgttcttcaaatccatagacggtgctttgtaatcattcagtgtcaactgattcttggcgacggtgaaacctgcgggcagcaaaccttcgcggtttttcagtttgtaggaaacgttcagcaaccattccttgcaggtgcaggtcttgccgatattcaacgtaatcttggctgtttcctgaggagcgacttttaaatcatccacgcgtccggtgcggattacttttccatctttcagtacttgccattccatatagtaggcggacaggtcacggaagaagttctcattgaatacatttacttcccctttgcttaaatcggcgggagtagtccagatattttggtaaaagtgacctacttcatacatgtgcggattaggaacacggtcggggctgatcaaaccattgtcacagaagttattgtcagaagcgtcaaaacggttgaaatctcctccgtaagcatagatcatcacgccgtcttttcctttccagcggcaggactggtcaacgaaatcccagataaatccaccttgcagattcggatatttacggatcaaatcccaatattctttgaaaccaccctgcgagttacccattgcatgggcatattcacactgaatcaatggtttggtagcatcggtacgttgaccatatttttccatgccgttataatcatagtacatcggacagaagatatcggtatgttctttctggcgtgcttgttcatattggcaggcacggctggggtcttctgctttaatccatttatagcattgttcgaagttggggccgtcaccggcttcattacccaatgaccagaagatgatgctcggatggttgaatccgcgttgtacattgcgctggttacgttccagatgggctttcttataagaggggttcttggccagcgtcttgtcgccgtagcccataccgtgagattctatattggcttcggccacgacgtaaataccatattggtcacataaatcgtaccataagttgtcatccgggtagtggcaggtacgtacagcgttcaggttgaattgcttcattatctggatatcctgtagcatacgttcgggagatactacatagcctccatccggatccatttcgtggcggtcggctcccttgaacaggattgccttaccgttaaccaagatctggtcacctttcaattcaatcttgcggaaacctactttgacaggaatcacttcattgctgccctgcatgctggcacgcaaggtatataaataaggtgtttcggcactccactttttggggttctctacgttcatggtcaccagaccggatttgttggcggtagcggttgccacttgcttgccttgtgcatctaccagttccaaatcgactttaccactgcctttcaaatccagattgacagccaggctgccgttttggtaagctgcgtccaagtcgggagttacacggatatcttgaatgcgttttttgttgcgggcatatagatagcagtcacgtcccacgccgctataccggaagaaatcctgatcttccagataggtaccgtcgcaccagcggaatacttggaaagcgatcaggtttttctgacccggttttaaatatggagtcaggtcaaattcggcttccagtttgctgtcctcgctgtagcctacataacgtccgttcacccacaaatacatattggaggtaaccgaaccgaaatgggcgataatatcttttcccttccatgaggcgggaactacaatttcacggcggtaagaacctacatggttattctctgtcggcacttcgggagggttgttctggaactggttacgccaggcatagcctacgttcacataaataggatcaccgtatccgttcagctcccatacggcgggaacttgcaggtcatcccagcctttgtcgttgaagtcggttttccagaaatcagtcggacgggagtctgcatcctttacccagttgaacttccaggttccgttcaaagtcatgtagttagttgattgttttttgtctgctttcttagctgcatctgcattctcaaaagcaaagtagttcgtgtgcatcggcgcacggtttaccgcatttatttccgggttgcgccattcttggaaggtctgtgcgcctgctgtaagggcgaggactgtgaacagacctgtcataagttgtttcttcatgctattattttattggttttgtgcaaatatagtgaaaataatagttaccgatggaacataaatcgggcaatatttgttataattgtgaatgatttgtgttctatcctaaaaaattatggcatttctgaggcgtatttggaataaatggcagaatttactgtatgatgagaaattaaagcataaaatatatgtgattatttttgaaagcgacacaccgatgggaaagttattcgatgtggcgttgatagggttcattgtcttgagtattctggtggttattgccgagagtatcaagagttgggataccgttatcgggccttatctgcgggtgtcggagtatgtttttactttcttttttacgttagagtatgtgttgaggctttattgttctcccaaaccgcggaagtatgctctgagttttttcggtatagtggatttgctggctaccttacctctatatataggctggcttttcggcacggcacgttatctgctggtgatccgcactttccggttgattcgtgtgttccgtatctttaaacttttcaattatctgaatgaaggtaatttcttgttgcgttccttggtgttcagcagtcggaagattattgtttttttcttgtttgtactgatattggtgacttcgatcggtacattgatgtatatgattgagggacagcggccgggcacttctttcaataatattccgaatagtatttattgggcgatagtgacgatgacgacggtaggttatggggatatcactccggaaactccgctagggcgcttcctttcggccattgtaatgttactgggctataccatcattgcagtccccacaggaattgtttctgcgtctatgatccaggaacatagacgcagggtggccctgaaatgtccgcattgtggtaaggacggacatgaggacggggctgcttattgtaaatactgtggaggaaaactggtaaattgattatggaatgctgtatgatagaaagttattctatcacccatcgcttatcatgcgccaccgtctttttcggatcataagtcattccttctttggtagggatttttatcacgtaagtccgcccgctgtggttggacaaggatgtttcccgtaaccagggattcatattctttaatatggacagattgattcctttgctgcgtgcgaaacgtgccaagtctgcaattcctttcgtcacagtgacttccgtataaggaataggcggatacaaatccgatgcacgcaggcggaaaccgaaagtagtgggggcattgaataattgtttggcggcaagaatgcggtacacataccgggcagtctcttctaccagttgcaaatccaacgagtcgtccacatcctgtttggccagttggctggcaatgcgtgcctgaccggcattgtaagaggcggcgacagccacccagtccttatattttgcatacgcgtctttcagatagcggcaggcggcacgggtcgctttctcaatatggtaacgctcgtccacattgttgtttacctccaatccgtaatcccgtcccgtaccttgcatgaattgccatagtccggcagctccggcagaagaacgggcggtgggattcatattactttctattaccatcaggtacttaaaatcataaggtattccgttttctttcagtatgggttctacaatggggaaatagcggttggcttttttcagcatttgcaaggaagtactgtgcatataggtgaatgccaatagttcacggtccatacgctcgtggcggtcaaagcggctcaaatcaatggttttgccacagaactcaatactggcgggaacttcgggactactgtatttcaatgccgtaatacctgaatcttcccgtatgatagtggtatcttcctgctccgtttttggagtagcgcaactgctgcttactaaggccggtgatgcaactacaatgcaaaaggctgccacagcagccagattgatggttatttttctcattttttctttattcgttttcattctttttttcttttccgccccgtccgaagttacgatattcggtaggggtgaaattggtacgctttttaaataccgagaaaaagtgttcagtagaggtataattcaattcataacatatctctttcactgacatggaactttcaatcaacagctgcttcgctttgcgcagtttcagctcttggaaatacttggcgggcgcataaccggtgtattctttgaatactttgcggaaccaggaataactgattcccaatttcatggccagttcttccgggtctatatccttgtatacattttcgtgcatgatgattttggcactttctattttttgtgccgcattgtccacctcatagcgtttgttctgcgagatagcaagtacggctcccataatgtgtaaaacgatgccggacaaatattgttgcgctgcggtcttgtctgcttccgctacttccagtgcacgggcaaaaagactggccagttcttcattgataccgatatccagaatctggctttcttttgagataaagctgttttttaccagattgtctataatcgggccttcaaaaccgatgtaatattcgttccatcctgtcttttgcagcggcgcataggtatgccactgtccgggaaacaggaaaagtatctgccctttggatatgtcgacagacggggttgtgtcgctggcgaaagttcctcgtcctttagtgatatataccaactgatattcatgcagcacacgtcctttctgggctgtgaaataataggcgtccgggtggttgcgtggtggataaacgcttccggccctgatagcctggaatccgacggtagtcaccgacaagccgaaacgcttgtcacgctcattgacaattaggtatttaaaatcagcgccttggtcgttgtaatgcatgtttctctgttttaaaattaggtcacacttatcggcaaatatacaattttttatcttaacagcctctaacctttttgttctaagtgtttctggaagtataattttagtttcttatgtatgcaaatgggggaaatttagaacaaatcttatggaatatttgcttaaaatgcttttttttgcgaatattgcatcaaatcttaaagttgaatctatgcacttggcacaccgtaactgcgaatatattcttggagtaatatatctttttgtttttcctgttttgctttgggctgataataaggtgaatacttatcattttaaatccatttccacttcggtgaacttccctaccaatgaagtcaggaagttatttcaggatagccaggggtatatatggatttcgacctacaatggtctcttgcgttacgatggttattctattgttgtatataaacccgatggagtgaatcatggacgttccattgatagttttgtgaatatggtggccgaagacaaggagaataatttgtggataggtacgcacaatggattatacgtgttgcataaagaaacggatgagatagagaaaataatcagtcctttgttacaggtaagcaatgtagaaagtatcctttatgcaagtaacggagatttatgggtgggaagcaacaagggattgtttcgcagaaaagccggcagccgtactttcgattgtgaaaaaaacatggatataaagtctgttgtcgaagaccggaaaggtcaaatatggattggtacttgggaacaggggctgctgcgttatagtcctcaagaggaattgtattatacttacgacgggattaaccctggtaattcggcgcatgtcatatttcaggatgaagccgggaatatttggatcggtacctggcggtatggactggtgaaactcattaatccgtatgattcggaacatttctcatttaaaacattccggaacatcaagggaaattctcattctctgttggataatattatctacgccattgctcaggataaaaattccgggaagctctggatcggttcacgcagtggggtcagtattttggaagatgaatcgggagacgggaattttaccaatattgttccgggcaaccttcaaggagatttaccttttaatgaggtgaactctctgttgtgcagtaaagacgggctgatgtggctgggtatgttgggaggaggtgtttgtactgtaaatacaaataagttccggtttaattatgattctttggaggctttgcgtgagcattgccctaccagctctgtccgcagtgtctatcaggaggataatgggaatctgtggatgggaatcatgggattcggtctggtattttatgatatgaaacagcataccattgttccttaccgctctcatcctatattgaagaatatgggatatacatcgacggtcaatgatattatttatcgtaaaaggacaaatgaattgtgttttgccacttgggatgatggagtgtggttctataatgtcaaagccgggaaagcacacgtgataaataccgttaccaatccggagctgagtgatatttgtatttattctttgttggaagattcgaaagggaatctgtggttggggacacgttcgggagtgtttatcttggatacggaatcaagacttcattctttgaatgaactggtgactttgacaaatcaggcattgccccaaatttctattttcaaaatggcggaagatcaagatggctttatctggatagcgactagtaatgaaggggtatggcggatagatacatccggagaaacatataaggttaagttttatacgccttcggatggtacattatccactgtcggggcgatgagtgtttgtgtggatggatacaacagagtatgggtggggtcgaatggtaacggactcgatttgtatgaccggaagaatgatcgttttgtttcagtcttgaatgattatttccggaatggagatgttgttttcagcatgctggaggatgatgagcatactttatggcttactaccaatgcggaaatgtatcacattgatatacctttggacggtgctgcaccgaaaatacatacctatacggtagatgatggtttgcaagaccatatgtttaaccggaattcttgcttcaagggggcggatgggaaacttttcttcggaggattccgtggattgaacagtttttatcctgataaaatagttcaggatactgcctattctccggtagtaattacagatataaaggtacataatgtatcggtacgtacctatcctctttccgtcagagaggggattgctgcaaacagagctattgattttattgataaaattgtattaggataccgggagaataatttcagtcttgatttttcaatattgaactatatcaatcctgagttgaaccgttatttatatcggttggagggatatgacaaggaatggttgtccgttgaggctggacgtcggtttgcctattataacaatcttccggcaggtacttatactttttgtgtaaagggagccaatcagaatggaatctggtctccggatatgaaatgtctgcgtataactattcttccgccgccttggttatcgtggtgggcttattgcctttatgtcttgttgttcgtttcattggcatggtatacttatcggattgtcagaaaccgtatccggatgaaacaggccatagagatggggaagatagaacggcagaaaatggaggaaatcaatcatgctaaattacagttctttaccaatatcactcatgagttgctgactccgctttctattatatcggcttcggtggatgaactgaaacaagaagtaccggcaagttcgtcggtttgttctgtaatagctgataatactgtgcggttaatccggttgattcagcaaatcttagagttcaggaaagtggagaatggcaagttgcggctaaaagtttcgcatggaaatgtcagtatgttcttgaaaaaatcagtgtcggctttcgctcctttggttaaaaagcagaaattgtccatacaatttgatttgtctgaagaatattcgggatattttgatgtggataaattggataaagtggtgtacaatctgctttccaatgccgctaaatatactcctgaaggaggaactattgtggtgtcgcaggctcatgatgaggaaaagaggacttttaaattgagtgtgaacaatcccggcgagttgattccaaaagagaaattggatcatatgttcgagagattctatgaaggggagtatcgtaaattccataccatagggacgggtatcggtttgtcgctgactaaagatttggtattgttgcatcatggaacgatacaggtatttagcgataaggaggaagggaatacttttgtggttgaaattcctataggacgtgaggcttttgctgaagatgaggtagacgagaatactgaaaatgtggactatgctgttttatcggcagatgaaatggagaatgtctcggagattgatatgttggaagagaaaccggcagcatcgactattttgttagtggaggataatgaggaattattggctttgatggttcgtctgttgcatggcaaataccatattctgaaggccgctaatggaacggaagctttggagatccttgccaaacaggaagtggatttaattgtttccgatgttatgatgcccgaaatggacggtatggaattgtgccgccgggtgaagactcaatttgagacctgccatattccattgattttgttaacggccaagactagtgatgaagaccatgtggaagggtatgagtctggggccgatggttatatctgtaaaccgctccgcctctctgtcttgtttgccaagatagataacttgttgaaacggcgcaaacgtatgggggggattttcgtaagcagttggtctttgaagccaaagaattaaattacacctcgatggacgaagctttcattcggaaagcggtggattgtgtgaatgcccatttgagtgattgtgattttgaacatgcacagtttatggcggagatgggtatggcccggactacactagcagataaattgaaactgttgaccggacttactccctctgcatttatcagcaatgtccgtttgcaagcggcttgtcggctgatagacgagaaaaagaaaatccgtatagccgatttggcgtatgccgtaggtttcaacgaccctaaatatttcagttcctgctttaagaagaaattcggactttctcctacagagtatatgatgaagtatgatggctgattattaccggaaataggctctatagggaataaacagcctttttccggtaataattctccctgtttcttttctgttcctcttacttttgctggcaaataaaacgaattatctttatttgttagacctttaaaaaaagtattatgaacatgaaaactctgacagaaaccagtacattccgggtactgagtctattgctgtgtctctgcttcttcatccctgcgatgaatgtgagcgcttccagtctgcaagcagacaagtttaaagtttccggtattgtaaaagatgccacaggcgaaccggtcatcggtgccagtgtggttgaaaaaggaacaaccaatggaacggtgactgatttggatggtaatttcaatctcacggtggcttctaattctactattgtcatttcttttataggatattccgatcaggaatatcgtatttcgaaagacaatacggtgctgaatgtaaatctgaaggaagatacggaaatgattgacgaagtggtagtagtcggttatggcgtgcagaagaaggaaaatctgacgggttctgttgctgctgtaaatttcaaggatgtagcttctatgccggtagcgaatactgccaatatgcttcagggtcgtttgccgggtgttatgttgaccaacaatggtgcccaggccggtcatgacagtcccgaaatccgtatccgtggtgtaggaacttttgaacacaatgatccgatggtcttgatcgatggagtggaaagctcggtaagccagattgcggaaatccctgcagatgatattgaaagtgtttccgtattgaaggatgcggcttcggcttctatttatggtgtacgtgctgccaacggggttattctggtgactaccaaacggggcggtgagcagaaacctaccattacatattccggtagtatcgctttgcaagaagctaccgtgctgcccgattatgtgaattcttatgaatgggcgaagatgtataacgaatgctggccttccaaagcatacacggatgaaatgttacaaaagttgcaaaacggatcagaccccgatcattttgccaataccgattgggctaaggaaatgtttcgtacagcagccatgcaccaacaccatttgtctgtgaacggtggtagtaaagcggtacattacatgatttccactcagtatttccagcaggatggtatcttgcgtgaaacggccaatcaacgttttaatttccgttccaatctggatgcacaattgggtattgtaaaattaggtctgaatctttcgggaagccgtcagaacattgatgagcctactaccagtgttaccggtgaaggtttgatgcgctaccttacttggtttacccgtcctactgttcctgtgcgttattctaacggacattatggatttttggatggaaatcccaatatttcccaatccgtattcaaaaatccgattgaagctttgaatatgggctataaagataacaagcattatcgttttgatggtaaattctttggtgaaattgatatcataaaaggattgaagttccgttcaagtctggcttataaatattatatgaacgatgtgactactttcaatccgaagaataatataagatacgatgctgaaggaaatgcgctgaccacagtcggtaccaataaactgacagattatcattatctggaaacgacttatattaatgaaaatattctgacctatgatttttctgtaggaaaacattcgttcaatctgttggcaggccattctatccaggctacccgttgggacaagaatgaggcgtccaagcagggattcgctaccgataatatttatgaaatggatggaggtactatgaatgaccatgtgaccggatcagcggaagagagttccttgcagtcattcttcggacgcttgaattataattacggaggccgttatctgttagagatgaatgtccgtcacgatggttcgtcacgtatgcccaaggcacatcgttatgctaccttcccttcattttcgggtgcatggatcatgacaaatgagaaatttatggagaatgtgaagttcctccactcattgaaattgcgtggtagctggggtaaattgggtaatcaggaaattggtaactatgcttatgcggctacattggcggctagtggcagttactatttcggtgatagcaaacagattggtatgaagactgccaagatacctaatgagaacattaaatgggaaacaactactattacagactttggttttgatgctgctttttggggtggaaagatcaatgtcacttttgactggtatgagaaaaatacctcggatattttgatgaagctcgctatgccgggtattttcctgggatctttggatgctccttatcagaatgcgggaaaggttcgtaaccggggttgggaactggctgctaattatttcgatcagaaaggtgactgggcatggcaggcaggtttctcgctttcaggtgtgaaaaatgagattactgatatgaaaggggtagaagacattaaggataatacgatcaatcgtgaaggtgaagccatcggctcttattatgggctgaaagccatcggtatctatcgtacccaggcagatttggaccgtgtaaatgcgaacggacagaagattatgcaaaacaaccaggaaccgcaattaggtgatatcatgtatgaagatatagacaataatggtaatataaatgatgctgaccgtactattatcggaaatccgttccctaaaatgcagtattctttcaatctgggattctcttataaagattttgatgtcaatacattctggcaaggcattgcaggtgtatatcgttataattgggatgaaactactatttccaacggtggaaacaagactagccgttggttggacagatggtctgaaagtaatccgaatggaagcatgcctcgtttgggaggaactattaataataactattcttcattttggttgacaaaaggtgattatttgcgtctgaagaatttggaaatcggatatactttcaggcaaagagagtttttgaccaagttgggcgttcagagtatcagactctatttggcaggaactaatttgcttactttcacttccttggacgattatgatcctgaaaaactgagtacagattcccgtaatgatgtacatcccaatacaagaacttattcatttggtgttaacgttaaattttaaaagcaacaactatgaaatcaattaataactttatagggctggctctgttgtcaggagctttgctgacttcttgctctgacagctttttgcagagggactcattgacagaatcttcatccaatacattttggcagacgccggatgatgctttgatggcgttggcatcttgttatgatgctttgcagagcaatcagctttataattccgaccaatattcattgggccctttatatatggattgtatatcagataatggcgggcattttaattggagtggctggatggaaggttatgatatggctatgggaattcataccccaagttcttctatcattggcagttattggaaagattgctatgaagtgatcagccgttgtaatgtgctgattgctaatattgatagagtggatatggatgcttcccaaaaggcgatttatcaggctgaggcaaagaccatacgtgcattgatgtatataaacttgactatgacgtatcaggatgttcctttcctgaccgcccctttgaccattgacgaggctgaatgtgaaaagacggaccgtgcggctattgtggctcatgttatgactgatttgcaggatgcggctgaagtacttccgcaaaatgcgtcttcacggggacatatcaccaaaggagctgctctttccttactggggcgtgtggctttgtataatgaaaaatgggatgacgcgattgctgcttataagcaggtgcaaggtttgggatactcgcttgatccgagttatgccaaactgtttactcaaagtggagaaacttctcctgaaatcatttttgcagtccgttatgaaggaccgggtatgagtgaaggtgctgcttttaatgcgcattggaatactccgctggaagcaatgaatggtactatagatttggcagatgcttattattgcaaagacggtaaaccgactaccgatacgaagatagccgaactgaacggtgggggtggcttggatgtcagcaagcctaatcctgctcattttgagaatcgtgatccgcgtttatatagcactttgtttgttcccggtatgctttggaacggtaaaggaggtatagatacttcggcttcaaatccgtatgccaatgtatatggcggagctgccgcttctctgtctaccgtatatgtttataagtattttgatcctacggatacttctaactcttgggataatggacaagacttttatgtggtgcgttatgccgaagttttattatctttggcggaggcgatggtacagaaaggaggctatgtttatagtgatgtaactgctttggttaatgaagtgcggcaacgtgcggatgtgaacatgcccacagtagaggaagtggaaggcacttctctttctaaagatgaattgttggaagtcattaagcatgagcgtcgtgtggaactggcttttgaaggtttgcgtttgtttgacctttatcgttggaaggaattggataaggcggtagccaatatagagaatgaacgcactatgtatggcttggcttatgaagcacgtaagttcaacggtgagagggattatgtatggcctttgccgactgccgaactggatactaacaagaaactggttcagcacgacttgtggaagtaatgtggagtgcaggttttcatcacagggtacacggactgtcacaaagaagtaggaggcaaataacctttaaatcaaaaaactgtgtgaatttgcgtaatctgtggtgaagcctggttgttctgacaacttctggaataaaattgataactttttaaaaacggaagagaaatgagaaaaacaatgatccttcttttattttccttcctgttggcagcatgttctgatagtccagtgtgctattatctggatgctaccggcggtgatgataataatagtgggttagccccggatgaagcatggaaaagtctggaaaaactacgtggtgtgaaattactgccgggcaataaagttttgttgaagcgcggtgaggtttttaatggcgaacttgaaatcaccggacagggtatacccgaagatcgtatttatatagatgcttatggtgatggtgaacggaaaccttgcattgtgggatatgatacttccttgtatgcagcccgtatctgtaattcggactatataacgatgcagaatttggaaatcgtgaatacaggcaggcagcctctgccttatcgttcgggcttgaagatagagtgtatggattatggcgtatcgcagaacattgttgtcaataatgtgactgtacgggatgtcaatggttcgttggtaaaagaaaaaggcggagggtgcggtatttatatagtgaatggcggtgaaaagaaaatttcaacattcaataggttaaccatagagaactgccatattttgagatgtacccgtaatgctatgatttgggctgcttatagcgaccggcagaactggcatcccagcaagcataccgtgatacggggaaatttgatagaggaagtaccaggggatggtattgtacctatcggttgtgacagtaccttgatagaatacaatgtaatgcgtgactgtcctgatatgcttcctgacacagaggcggcagcaggtatttggccgtggagttgtgataatactttggtgcagtttaatgaagtaagtggtcataaagctccgtgggatgcacagggatttgattcggattggaattgccggggaacggtcattcagtacaattatagtcatgataactatggtggcttggtattggtttgcaatgacggcacggccgacgcatcttttaatgtaggtaacttgggcactatagtccgttacaatgtgagtataggtgacggagtgcggcctgaaccgactcgtgccgggatgttctcaccggctgttcatctggcaggtcctgtaaaggatagtcgcattacccgtaacattattcatgtgaaccgtaaacctgcggctgatatcgaccgtactatgattactttggattcatggggcggatatccggatagtacatttattagtgggaatattttttatgctcccgaatccagcagattccagttgacagaatctacacataatttctttgaaggcaattattaccttggccggttcgagaaattacctgaagatggtaaagcctgccaatcagctgaaatttatcagaaggaagtactggcaaaggatgaaaacggttatcagggcttggctttgttgatggatacggtggaagtgaccggagtaaaaggagtttttgtcaataaggaagccattgagaatttctttagccggttagagaaataagtaaataatagctgtaatttaatgaggggagcaaaactaaaatgacctgatcatatagtgcgataggttgttttagttttgacatctcccttttttatttatggttcattctttcttctttagatctatttctccggagaaagaaatagattgtctgtttgtgggggtgacctgtatgttactgctgccattgggataaatggtgatattgtaaaggtaattgtcttcctcgttccgtacttttagtgtgattttagcatttccctttttgctatatgttgaagtatattctgataaaggagcactaaaatttaatccttttccacctccgtaaggaacgttatacgccactccgaaataaggcagataggaatataccgaatcgtttcttatttctaaagaataatcggaagtcaggtgtttgctgcctcctttcataggcattacccggtccacattgattttgtatgcctttgcgtcaacagcctcgcgtactgcttgttctctttgttgtttcttctctttcttgttctgagccgttataggtatcatactgcctgatagaaggagacttgccaaaaggaataatttatttgctttcatatctctctgtaggtttagtgaatctgtccttgccaaagatagccaaaaagaatactcattgttctgaaaaaaacataagataatcaaactgtcaatgagttaagtacgcgatttatcttttgagtcccgataataaaaaagatgatttgtccccatgcggagtcaaatcatctttaaaatctccccattaggggaagactataaaatattatttgggtagattaaaagccacactcatttctttcatctgttcctgactcataccgtccggctcaaatcccatattcttggcagcgatgtaaatcaatgcggatttatttaaaacatcgatttggtcgaatgcggccattacgtcacggtcaacggcaaaaatgccgtgtttttcccacataacgacatcataatcggctagttccttgatggttgcatcggctaattctacagaactaggcaattgataaggaatcatgcccaggccacgcggacagaatgcttttgtttcaggaatcatactccataacaggttggttgccacatctttttccatgaactttttgttgtgagacagggcaatcagttcgatggggtgtgtatgcacggatgctttgtaaggagaacctatgctgatgaggtaattgtgtacgctcaggtgggagggaacttccgaagtaggttgaaccggtttgtcggcaatgatgacatagctggcacagtcatccaaaatacggatgacagaaccgttgtccataggccaacgcgccaaatcccgcatacgcatattggttcctttgcaataaaaataacagcctttcaagtgaggcagtgttacaccgatttgttttacttcgctgatagcgggcatctgacggatttcatcgtctacatattcggtgatattgacggtgatattacctccgttacgttcggcccatcctttttgccacaaatatccggctacttcggctactttattcacctctttggccaattcagggcgattgtctaagattgatttcatatcttttttatttgattgttcataggatattgttattcatctttttcattctgaataacagtatgctacaaatatagtaattcttttaaaataaattaggaaatacgagagaaaagataagaactaccagtccggttatcagaacagtgatagtccgggtagatacgcctttccattcttttaataaaataccccatacgttactgaaagtaacattcaaagccatcaatatacaccatgagaaagctagcagtacaggactttcggtcaggaaacttttacccatttccaaaccgaagaattgcatataccacagtactcctgccaaagcacagaatatcaagttatttccccatacattgcttttggcataatcactcatggttttgttggctatattttgttgcagacagtaaaccgcattggtcaaaaagcctcccaatgttactaggaagattacgggaagtcctgcataaagcccttctacgcctcctgccaatgcagcttctttgatgggcgttccggcatcgagtcctaaagcgaaacaggcactcatcacacctgccagtagggctaccaacagtcctttggtcagagcgaaatcttttactgccgcgcgtttttcttcttcgctcatgtttttggcgcgaagactgccggcatatcctataatggcaatacccgacaaagtgatacatactcccagtaaaagaataagtccgtttccttcaaacaggttggttccggcaaaaatggcgggaaaaagtgtgccgaatccggcacaggtgcccagtgcgatactttgtcctaaggccactcccagataacgcatggaaagaccgaaggtgagaccgcctactccccataatataccataaaagatgctcatcggagcacctcctgttccccaaaggtcaaataaactgcttccttgagggatacctagcaacgcacccaataacgggaataccagccaggcaaatacaccttgtagcagccagaaactttcccaactccattctttcactttttttataggtacgtatgaactggattggcagaaacttcctatggcgatgatgattaatccgataatgatttccattgtttatattcttttaggctacaattatgttcccggtaggggcagcacttgaggccgcccctacggaagacaatcttgtagttggatattgattagcgtttcgaagtgacttctgcttcgtatttctctacttctgcaatgaactcttcgcctacgggtacattgttcttcaagcagaacatatcccatacagcattccaaggcaaagctttttcttcttcgagcagagccagacgttggaagccttgtccgtttgcttcatattcgcgcagtttggcaatcggttccaataaagcgcgtaccatacatttttgagccgcgcggctgcctataacgtatgcaccaatgcggttgatggaagcatcgaagtagtcaagtccatagtgtacacgatccaaggcgttgcaacgaacgatttcgctgaataaatccatagtcgggtcgtccatgatggttacatggtctgagtcccaacgtacggggcggcttacgtgcagcatcagttcggggacatacaacaacaaggaagaaactttgtcggcaacactttctgtcgggtggaaatggccggtatccaaggtaatcattttgttgttcttggcaccgtagccaatatagaaatcattagaacctactgtatagctttccagtccgataccgaatacttttgattcgatacagtctttcatgttcttatattctgttgcgaaaatctgatccagagagtctttcaacaaagcacggtatttcatgcggtttacagtgatgtctttgctgccatcgtgtacccacaggttcatgatacaaggatcgccctgggctttacccatctcttcggctacggcacgacaacgtttggtgtgctcaatccagaagttgcggataccttcatcgggatttgataaagacaagtcaccgcttttaggatgagagaatgaagtagagttgaaatccagtttcatgttgttttccttaccccattcaatccagcttttgaagtgttcgggttctacttcgtcacgatctacgacttttccttggaagtcgccataaatttcgtgcagattcaaacggtgagtacctggtatatatgaagctgctttcagaatgtctgcacgtagttcgtcgatgttgcgggctttgccgggatagttacctgtagcctggataccaccggtcaatgaacctgcctgaacttcgaagccggttacatcatctgcttgccagcaatgcagtgacagatggaaattctgcatggtttccattactttttctgtgtcgacacctacagcggcataacgttcttttgcgatctcatacgctttattaatcaattcttctttcatgatattatttgtttgtttaatgaataaatttcaaggtgaatattaaatatcttctctataatgagctaaatacttcttatatgcttcttcccattcttctgcttgctggggctcaaaagaaacggtttctatggaagtgctgattagttggcgcatagccgcgatatcgcttaccagcccgttggcttttgcctgtaacataatgttaccgatagctgttccttcactgggacctgctataacaggtacgcccactgcattgcaagtgaactggtttaacagattgtttcgtgagcctccaccgataatgtgcagcttttcgatggggaacggggccatttgttgcaaatagccgaatacttgtttgtagcgcagggcaagactgtcgaatatgcaacgggtgatttcgccataactctgtggtacaggttggttggtttctttgcaataatgtccgatggcttgaatcatagatgtcggattggagaagcagggggcatcgggattgatgagactgcggaaagcgggaactgtcagagcggcatctatcagttctgtgtaagaatagttgttggttgattcccattctttgcggcaacgctccaacagccacatgccacagatgtttttcaggaaccgggtagttccttccacacctccttcattggtgaagttctgttcaaagctttccttatttataatggcatctttcacttcaattcccatcaggctccacgtaccggaactcagataagcgaatctttcgttttgtgctggtacggcagccacggctgaacctgtgtcatgaccggcaacggcaatgactggaatagctcccagacctgtgattttctgcacttcttctgtcagtactccgataggctctcccgggaaaacgaaacggccgaactgttcttccttgatatctgctacatccagcagttccttttcgaagcgtttggtgcgcggattcaacatctgggaagtagaagcgatggtatattctgttaccattttaccggtcagcatatagcttaaggcatccggcataaacagtattttatcggctgcttccaaggccgagcaatgattgcggtggagtgttgacaattggaacaaggaattgaaattcataatttgaattccagtgatgtcatatactcgttcacggggaatatgggtaaaatattcttcaggtgcacctgttgtgtgagggtcgcggtagcaataaggattgcggagtaactctccgtctttgcccacgaatacgaaatccaccccccaagtatcgataccgatggaccggataggcagattgtctttggctaccactttcagtcccctgataatttcattgtataaggcgtaaatatcccaataacaatgtcctccggtttctataatatgattagggaaacgagtcagttctttcaactccattttgccttctcccaggcaacctaagatggtacgtccactggtggcacccaggtctaccgcaaagaaataagtgtgttccatgcctttatttttgattttaaggaattaatagtgatgcaaaaatagtttattccccgaaagtcgtccttgtttttttgatattataactgttggatttggttgtacctgccgtaaaacataatattaccgtctttttaagaagatcgcattgaaaagaagaatttggtgtgattttggtttactcttgggatgatggataagagctttattgaaaatatgcataaagtcgcaaaaatattctcttttttgtatctatattcccgaatattctgtaattttgcagccgaatcagaataattatgcagtatgaagagcaagaatagcagacttgatgccattaagattattatttcgagcaaggaagtaggtagccaggaagagttgttgcaggaattggcgaaagaaggattccgattgacccaagctactttgtctcgtgacttgaagcagttgaaagtggcgaaagcagccagtatgaacggaaattatgtatatgtattgccaaacaataccatgtacaaacgtatgactgagcaacattcggccagtgagatgttgatgcataatggatttatttccattgaattttcggctaatctggcagtaatcaagactcgtcccggatatgctagtagtttggcttatgatattgataaccggaactttgatgaaatattgggaactattgctggtgatgatactattatgcttgtcattcgtgaaggctgcacaagagcgggagtgaagaatgcgctttcattgattataccgaatatacaataaaataatatagataaaaaaggaaatggatgctaaacaagtggatgtgatggtggcagatgcctcacatgaagtttacgttgataaaattttagatactattagagaggcggctaaggtacgcggaacaggcattgcagaacgcacacatgaatatgtgactacaaagatgaaagaaggaaaggcgattattgctttatgtggagaggattttgcaggatttacctatattgagtcatggggaaacaagcaatatgtagcaacttcgggattgattgtgcatcccaattatcgtgggatgggcttggccaagcgtataaaggcggcttcgttccgattggcacgtctgcgatggcctaaagcgaagatattcagtctgaccagtggcgcggcggtaatgaaaatgaatacagaactgggatatgttcctgtaactttcaatgaactgactgatgatgaggccttttggaaaggttgtgaaggctgtatcaatcacgatatattagtggcaaagaaccgtaagttctgtatttgtacagccatgctttacgatccggctttgcacgaagaagacactatttaataaattaaaaattaagaattaaaaattaaaagatggctgcgcgttcatgtacttatttctcagttttcaatttttaattctcaattaaaataatatcattatggaagaaaagaagaaaaaagtagtagtagcattcagcggggggcttgatacctctttcactgtaatgtatctggctaaggaaaaagggtatgaagtgtatgctgcttgtgcaaacacgggtggtttcagtgaggagcagctgaagcagaacgaagagaacgcttacaaactgggtgctgtgaagtatgtgacattggatgtgacccgggaatactatgagaagagcttgaaatatatggtattcggtaatgtgctccgtaatggtacttatcctatttctgtaagttctgaacgtatcttccaagggttggccatagcgcgttatgctaatgaaataggtgcggacgctatcgcacacggctcgactggtgcgggtaatgaccagattcgtttcgatatgacttttctggtattggctccgggggttgagatcatcacattgacccgtgacatggcattaagccgtcagcaggaaattgattatttgaatgaacatggttttgccgctgactttacaaaattgaaatattcttataatgtaggtctttggggaacttctatctgcggtggggaaatattggactctgcgcagggtttgcccgaaagtgcttatttgaaacaggtgaccaaggaaggaagcgaacagcttcgtcttacatttgaaaaaggtgagctgaaggctgttaatgacgagaagtttgatgatcctatcaaggctattcagaaagtggaagagatcggtgcaccctacggtatcggccgtgacatgcacgttggggataccattatcggtatcaaagggcgtgtaggattcgaggctgctgctcctatgctgattatcggagcccatcgtttccttgaaaaatatacgttgagcaagtggcagcaatactggaaagaccaggttgccaactggtatggaatgttcttgcatgaaagtcagtatctggaaccggtaatgcgcgatattgaggcaatgttgcaggaatctcagcgtaatgtaaacggtacagctatcttggaactccgtccgctttcattctctactgtgggtgttgaatcgaaagacgacctggtgaagaccaaattcggtgaatatggtgaaatgcagaagggatggacagcagaagatgccaaaggctttatcaaagtgacttctacacctttgcgtgtttattataataaccacaaggacgaagaaatttaataagtatgattaaagcaggaattatcggtggggcaggttatacggcgggcgaattgattcgtctgctgattaatcaccctgatgtagacataaagtttataaacagcagcagtaacgccggcaataagattaccgacgtacatgagggactctatggtgaaacggatttggtttttaccgacgaacttcctctggatgagattgatgtattgttcttctgtacggctcatggagatacaaagaagtttatggatagtcacaatgtacccgaggatttgaaaatcatagacctcagtatggactaccgtatcaagagtgatgaccatgacttcatctatggtttgccggaactgaaccgtcgtgctatctgccatagcaagcacgtggccaatccgggatgttttgccacttgtattcaattgggtttattgccgttagccaaacatctgttactgaacgaggatgtaatggtaaatgccattaccggaagtacaggggcaggggtgaaaccgggtgctaccagccatttcagctggcgtaataataatatgagcatctataaaccgttttctcatcagcatgttcccgaaatcaagcaatcattgaaacagttgcaaaacagctttaatgctgaaatagattttattccttaccggggtgatttcccgcgtggtatctttgctactctggtagtcaaatgcaaggtggaactggaagaactggtgaagatgtatcaagactattatgccgaggattctttcgttcatattgtagacaaaaatatagatttgaagcaggtggtgaacaccaacaagtgtttgattcatttggagaagcatggcgataaactgctggttatctcttgcattgacaatttgttgaagggggcaagcggacaagcggtccataatatgaatctcatgttcaatctggaagaaaccgtagggctgaggttgaaaccgtctgctttttaataaagaagagtttatgaaattatttgatgtatatcctctttttgacataaacattgtcaagggaaaaggttgtcatgtatgggatgatcaaggtacggaataccttgatttgtatggtggtcatgcggttatttctatcggtcacgcacatccgtattatgtggaaatgataagcaagcaggttgcacagttgggattttattccaattcggtggttaacaagctacagcaggaagtggcagaccgtttagggaaactttcgggttatgatgattatcaattgtttttgataaacagtggggccgaagctaatgaaaatgcgttgaaactggcttctttttacaatggtcgcaaacgtgtgctttctttttgcaaagcatttcatggacgtacttcactggcagtggaggtaacccacaatccgaaaattatagccccaatcaatgacaatgggcatgtgacttatctgcctttgaacgatatagaagcagctaaagcggaattggcaaaaggagatgtctgtgcggtgattattgaaggtattcaaggagtaggcggtattcaggttccggaagtgaaattcttgaaagaactgagtaaggcttgcgaagaagtggatgcagtacttgttttggatgaaatacaatccggctacgggcgtagcggtaaattttttgctcaccaacatgcaggtatccgtcccgatatgattacggttgcaaaggggattggcaatggctttccgatggctggtgtcctgatcagtccgaaattcaaacccgtatatggacaattgggaaccacttttggtggtaaccacctggcttgtgctgctgctatcgcggtgctggatgttatgaaaggtgagaacctggtagagaatgctgccaaggtaggtgctcatctgctgaaagaattgaaacaattcccacagattaaagaggtgcgtggcgaaggtttgatgatcggtatggaatttgacgaaccgattaaggaactgcgtcagcgtctgctgttcgaacagaaagtatttaccggagtcagtggtacgaatgtaatccgtctgctcccgcctttgtgtctgactatggctgaggctgatgaatttattggacgctttcgtaaagtgttggtataagctggagattcaagagggataataatcagcgaaagaaaataaggtctcgtcaggaaacatttcggttccggcgagactttttgatttcatcttcttcaaagtaattttatttttagcttttcataatacgttcttctccttttttcccttatctttgtagctatagacttaatctttaataatatgaaagtagcaattattggtgcgggaaatatgggaggggccattgctcgcggccttgcccaaggcactatcattccagcgagtgatgtaacagtagccgatccgttcagcggaagtctggaaactctacaggcggattatccggagattaatgtgacaacggaaaatccgaaagcgataaaggatgccgatatcgttattctggctgtaaagccgtggttaatagaccaagtgttgagtgtggttcatttgactccacggcaagtattggtttctattgcaggtggtgtaactttcgaacagctggtaaagagtgtaggtccggaacagaccatattccgtttgattcccaatactgctatttctcagttggaaagtatgactttgatatccagtcgtaacgccagtaaggaacaagaacaactgatgctggatatctttaatgaattaggattggctatgcttattcctgaaagtcagatggctgctactacggctttgacttcatgtggtatcgcatatgtcttgaaatatattcaggcagctatgcaggcaggtattgaattggggatttatccgaaagatgcacagaaaatggttgcccagtctgtgaaaggagccgcttccttgatattgaataatgatactcatcccagtgtggaaatagataaggtgtgtacgcccggtggtatgactatcaagggtattaatgaattggatcacgaagggtttgactcagcgatcattaaagcaatgaaggcttgtctgaaatagaaacaacctcatggaaatgacgtggataacacggttctcgtttttgtgtattgtgttatctacgtttttatagaaggtacttttgcaggtttagtataaaaatatgttcacttttttgtttccgatttcatatttcatgttatctttgctatacaagatcagatctaatgtgaaagagaaatatgataaacacagaattgttcaaagaagtgtcacctttgtctgccaaggattgctttattttgatagagcgtcagaaatcgaattttaattttcctatacatatacatcccgaatatgaactgaactatattgagaatgcaaaaggcgcacaacgcattgtgggagactccatagaagaaatagaagaagaggaactggtgctggtcaccaatcctcaattggaacatgcttggagggattataacaacaagccgcagaatatccatgaaataaccattcagtttcattccgatctgctttccgaccagattctgaacaggaaccagatgatcagcattcgggaacttttccaccgtgcccgtaaaggaatcgtgttcagcagggagactatcgcgaaagtccgtccgttgttgaaaacgctgtcttgcgagaacgatagtttctattccttgataaaactgcttgttattcttcatgaattatcattggacaaagggatgcgtgagctatcaaccgggcagtttgccattaactctgtttccaaagagcatactaacgagaagttgaacaaggtgctggattatgttcattttcatttttcggaagtgatccgtcttgcagatgtagctaaaatggtaaatatgagcgaggcctcattctgtcgttttatcaaacagcatacttccaaaagttttatcgatttccttactgatatccgcttgggggccgcttcacgtgctttggttgattcttccttgtcaatagctgaaataggatatgattgtggctttaataatctatccaatttcaaccgtatctttaaaaagaaaaaaggagtgactcctaaagagttccgtgataattatcgtaagaacaagactatcatttaaaaggttcggccggaactttctcatggacttgcctgattttgacagcactaaaagaaagcggattttctgaaagttcggggatgttgtaggatttgaatgcctggaaataatgttccgtgtctttttgcggtactacgaacggcttgtaagttttttcttctttattcggatagccagaacaaggcttctcatattgacggtctctattttgataaaatatcataagtatatgttcggatagtattggtttgtctgtcggtaaatttccatctttgcctttgggttacaacctggtaaaactttgaatactaaccttaaaaaagacaagtgtcatgaaaaagctatcttacctttttgccgtggcagcttccgccgcttgcctctgtgcctgtaccgatgttaccgatgctcttccggcagaacaaatcccggccgatgcacgtagtaccttgggggccgatgtagttcttcagtggaacaacgaagaacaaaccatcgatggttttggtgtggcgcaggccggctggtccgactatctttatgcccaccgcaagcgtcaggagattatggatgtgatgttcggacaggacgggcttcgcctcagtatcctcaggggcgaggtattcccccattacgatgaaaccacgtttaatatggacgaggatatcaatctgtctttggacgatccttttttcgatattgatttcaaccgtgatgagaatcgtgttgccgaaggcatcgcacagcgcaacggacagttgtggatcatgaaaaaagcgaagcaggaatacggtgtggacaaactcatcttttccgtttggtctgctctggcttatatgaaaagcaacggcagtacctcgcaaggttttttgaaacgcggcagctaccaggcctttgccgactatctttccaatttctgtgatgcctacacagcggcaggcctgcctgtctatgccatctctcctgccaacgagcccgagtatgcggcaagctggaactcatgcctctggcttcccggtaccactacgctgggaccgttcattgtgaataacttaggtcccaagttgcgacaaacccatcccgaaacccggattatctttggcgagaatgcccagtggtctgccattctgggctttatcatgggcagtaaaaattatgtgcgcgacattctgaacctgaatcctaaaatcaccaactttcccgtcattgccgccggacacggctatgtggatcctgtgaccgggaaagatcctgccattgaaccgttcagcaaagccgaatcgaagggaattcccgtgtggctgaccgaaatcagcgatcctacggaaagttatgatgctaccatgaccagtggcttgaaatgggcgaagaagttccatcgtttcttgtgtgaggccaataccggcgctattgtgtggtgggcaggtgctataccggatggcggaaccaccgaggggctgattaacattgaaaagaaccgcgtggactatgaagtgaccaagcgttgcgaggtgttcggcaacttctcccgttacatccctgtaggaagcaagcgcatctcggcgcaatatgatttcgaacaaggctatatggtgtctggctataaatatggtgacaacggttacacggttgtagccatcaaccctgcggatcatgaagtagttatttcgttggctcttgaaagcgctcaggtttccggtgctttgcaaggctatgtcaccgatgacacccgtaaatgggagccggtggaagctgttcaacctgccgatggtgtctataccctgaccttgccggcccgtagcgtggtttcctataccggaactgtgttgagtagttcgtctttgtaacattgattctgtttttatttctacgctgcaatagttttttgttccgtcattgtattgcgctgataaacagtaatatgcggtgacggaatttcctgtatccccacgaagtgctttttcgtttttttcttgcagaagccggttcgtcggatatcggtttccatgtcgggtacgtaatcttgatatatgtatggcagtatccgtgcaaggggatgggagtttccatgcaagaagactgcatcatttgttgcaccactcggctgaacgtgccttttcactcaagtgaagtgccgttgccacctgtgtgaaacggttgcttcaccaaggtgaagcaataaagtcataagactgttttcacggttgcatcctgttgataaaatacatctattgaagttttgtcattttgtgtgtggcggttgttgtgttgtacattgatgaacgataccgccgcttacctaccggttgagagcctttatggatgttttttcacagtaattggttgataattagaagaatactgtgtaggaaaaattttatatttcacgttcaattcagatgtgttttccattgtcttgaagaatttttttttgatattgataagatttcattgtttaatgcttgaattgtatttgttcctgcttgcttgaattgccatctttgcaatgttaatttttaattcaaataactatgaaaacaaagacattcttaatttcagctgctattcttccatccatggggcattaccgttgtttgcgaaagcaataacgtgttggaaatctatttttagttaattttacagcaatattttttaattaaactctaatacattatttatgaaacaaattgcatttacatggttgctgtgcatacttagtatatgtgcctatgctcagcaaattactgttaccggaacagtgacggatgcggagaataatccgttgattggtgcggctgttgttgtagtaggaactacggatggcgtgattaccgattttgatggcaaatataccattaaggccgcttccggtcagtctttgaatttctcttatgtaggttatcaggagcaaactgttaaggttgatggccgcagtgtgattaatgtgaaattgtcggaaggtgaattgttggacgaggtggtggttatcggttacggtacagtgaagaaaagccatttgacaggtgcggtcgcttctgtttccggtaaagagttacaggcaaatgttgcacgtagtgcttcagctgctttgcaaggaagagttgccggtgttactgtgtcggctgccaacggtcagccgggggaaggcttgaatattaatgtccgtggtatcagttcattgagtgccaccagtccgctttatgtgattgacggtgtgtatggtgatatcaatatggttgatcccgctgacattcagtctattgaagtgttgaaagatgcttcggctgctgctatttatggttctcgtgctgctaatggtgttgtattggtcactactaaaggcggtcgtttggaaactcctgcccgtgtaacagtggatgcctatacaggcgttcagatggttgtcaaatacattgatgtaatggatggtaatcagcttcgcgatttggcaaaggctaccggttatagttcggcagaagggttgctgaattggaatggaggtgctggaacagactggcagaaagaactttataactcggctatggtgagcaaggttagcttgaatgtatctggaggaaacaagacttcgacctataatctgtcgggaagctatcttaaccaggatggtattgtgaatactaccggttatgaggcatggaacattcgtgctaagaatactttttcttttttcaataatcatttgcgtatggggactacgttgatgatgaaattctataaaaagaagtacgaagatgtttcatatacctccgctctgacagctgtgcctatgtggaatgtatatggtgaagatggcacttggggtgtcgctccggaatggaccagaggagataatcctgtaggttggacagaagcctatgattaccaaagacatgggatagacattttattgaatggctatgccgaagtggatttgttcttgaaaggattgaaatataaattcaatgtaggtataaacaaatatacaagacgtaattatgcctatagttctccttattatttcagttctacttcacaaaagaatgaagcggaattgtcggaaagtacagactgggagaacgattggttgattgaaaatacaatcaattatgataatacgtttggcaatcatacggtttctgctttggtgggttattctgcccagcgtaacaatgcgcgtggttttggtgcaggacgtaagggtttcccggaaggtttctctgtgattgacgccggttcggtttcttcacaaaatacatcgggtagcgcgtgggccaatacaatgatttctatgtttgggcgtgtgatgtattcgtatgccgatcgttatatgctgtctgcttctgttcgtcgggacggttcttccaaatttgcagatggaaaccgctggggcacattcccgtctgtatctttgggttggaatgtgatgaatgaagatttctttgaaaatatcaaggaaaccatgaatgaattgaaaattcgtgccagttatggtgtactgggtaatttgagcggcattggcaattatgctacccagtctgttgtttataaaggtatgaataacatgatgggcacagaactttgggaaggtgccattaccggtaaggaatggacttcacccatgaatgtgacttgggaaaagacgaagaccttgaacttgggtttggattttgctttcttgaacaataagttcagtgtcagtgctgattattttattcagaaaacagaagatatgttgttgtctatgccgcagtctttgagttttggcttgagtgggaatcctacagtaaatgcaggtacagtagaaaacaaaggatttgaaatttcattgaatcaccgtaataatgtaggcgatttgtattatcatgtaggtgtcaatgccacctttatcaagaatgaactgacggaagtaaacggaagtcgtgatgaatggcagggattcaatcctcatgccaaaggaacgattacttatgccaagaccggtcattccataggttatttcaatttgataaagacggatggtgtattccaaagccaacaagaaattgatgcgtatgtggataagaacggtaataagatccagcctaatgcacaaccgggtgacttgcgtttcgtggattataacggagatggtaagattgacaataatgaccgtcaggatgtaggctctgctttcccgaaagttaacttgggtgtaagtctgggtgctgaatggaaaggtttggatttgaatatgttctttgacggaaactttggcaacaagatttacaatgcccagtattatagtacggtttataatgaatcaacgggaaaccaatatgcagaacgcatgaacagctggactgaaaacaatcattctgacattcctcgctgtttgtttggtactagcgatcctaatggtacaaactggggctatacggaccgttggttggaaaatggttcattcttgcgcttgaagactttggaattaggttatacgttgcccaaagtatgggtatctaaagccggtttgcagaatgtgcgtgtttatacggctatggaaacccttttcactataaccgattataaaggatatactcctgacttgggtatggtagatgccgatggtgccggtacatcaggtggttcgggtgtaatgacccgtggttgtgatgacggtcgttatccgatggcacgtactatcacctttggtttacaagtaaatttctaattaggaataagtaatatttgcagaatatgaaaaagaattttataaaatacatagctgcattggctgtagctccaatgttgttgtcttcttgtagtgatgactttctgaatgagattgatcctaaccgtcagactccgaccactttttggacatccgaggataatgtgatgaaaggcttgtccgcagtttataatcctttccgccgtatgaccagtggatattatggtgggttggaaggcatcatgcatcttcagatgcgcggtgacgacctttaccccactcgtggagaagaaccttatatttgggaatatttgtcgtttgtcaacacaacgaatacaaaggatttgagctggggaaacatctatgaaggcattcagatggcaaacgaattcatatatcgtgcggctacggttgatatggacgaaaccaaacgtgagcaaatgataggtgaggcttatttcttacgtggattctggtacttccgtttgcgtactgattatcgtgatgcggttatccgtactctcccgcaggatgcagatccggaaactcatggactgtctagcggtgatgaagtgctggaacaggctatttcagactttaaggaagccaagtctcgtttgcctaagcttcgttcaagcgatgagaacggtcgtgtaactcaaggtgcggctattgctatgttgggtaaagcttatatctggaaaggggattatcaggccgctaaggatgagtttgaaattataatgaatggttatggttacgatttgactcaaaagtatgaggacaacttccgtgacgatacggaatttaatgctgaatctatttgggaaatcaattatgatgccaaaggtaattcgggtgacgcttggggcaatggcactagtgacgactcgtttatgggaaacaaccttgctcattattttggcccgacactgaaaggtgagaatattggcggtggttggtataagatgcagccttctccctatttgataaaagaattcatttccgaacagcgtccggaaggatctgattccaaatgggataagcgtttgtacactacgtgcttctttaaatattctgatttcggtgatgtgaagccggatgaaaaattctatggtggtaaagtggaatttgatgatatgtttaaatggacggtactgcccgaaggcgatggcaaatatggtattgccaagcaaggatatgctcctgcttatccggttatcgagggtgttcaagggcgtttcatgatgaagaagtttgcagcttggtgggttcccacaggatgtacgatgtattctaacgatgccggacgtatcaacaatttacgtattatgcgctttgcagaagttttgttgctccacgctgaggcttgtctggaaaccaatgatgaaagcggagcaatgaaagatattaaccggattcgtgtacgtgccgggctgccggagaaaaacttgagtggaaaagatgctataatgacagaactccagaaacagaaattgctggaatttgccggagagaatatacgttgggatgatatggttcgttggtacggaaatgatcctgctaagttgaaagctatcatgcacgaacgcaagaccgattctcaacattatgaattgctttacgaagaaaatgaaagtggtgaaaaggaattggtaggatataaaccgacagaccgcatttcggatacacaaggatttgaccattttgaagctaaattcttgtacttcccgatacctcaggcagaggtggacgctaatttgaatttggagcaaaagccggaatggagatgattgtattgaactgataattaaaaagtatgagaggtgtgtcaaaacgtggataacgccatcgtttagttcgcaggggcgaggtccgctcgcccgaaaacagtttgctttgtgtcttcgggcaggtaaacccttcccctacaactgacgatgggataggcccggtttagttttgacacactcccataaaaacaatgaagccaaatgaaaaggaaaggatattatttatgctctttgttggttatgatatttgtatttttgtcatgtcgtgatgaagaacaggattgtacccaagctatgcaggatatacaaaaccagttgaaggaaaatgatttattgaaatctgtttctcaggaaggtgaacaatgtgttttgttattcgagtccaataagataatttttccgcaagagttaatccaaagtgtagatgtggatgcggaaaactggaaaacgactttgacatttgccaatggaagcacttatgttatacctaccttaggtacttcgattgacaacttgatattgagttctacagtcaatccttccggttgcaatccattatcggccagtgtagttgtaaaattacctgtattgggacgcattaaactgattgtacacagcaaaccgggaaagcatacgcctgacgtggaatatacatttaaagatgtgggattaaaacagaatattccggtattgggactttatcccaattataataaccagatcactttaatttatacggatttgcaaggaaatgaacgtgctcggtccaatctaaagcttcagacgaaaacattggaaagcagaaggctgcctaaggaaatcagagtggtaaaggctcaatatgaccgaatggagccaggcatgaatttggtaaactcccccggacaggatgaaacagacacttctatcccttatatgatagatgcagacggagaaatccgttggattcttgattgggagaagtcggatgaacatcgatatatcggaatcgggtgcggattgatccggatgcagaacggacattatatgaccggtgacggaaaccatcatcggatggtggaggtggatatgatgggaaatacaattcataattgggatatgctggaaaggggatacactatgcatcatgccatatctcaagataagcaaggcaatatattagcgactgtgagcaagacttccgctaaaatcgccaatgggaaagatgtacggataaatgattttattattatgatggatcccgaaaaaggggagatattgcaagaatgggatttggtgcacatgttggattcggctcgctatggaatgaccgattatgatctaacctcagacccttttgcacaaagtgccagtaattgggcgcataataatggtatagtagagtggggagatgattatctggctacagctcgttatcaaggaatctttaagtttaataaagctggaggtattgagtggattatatcgcctcatgggtattggagagataaatacttgaaattattattgaatcctcttcatgccgacgggactcctattactgatcctgaggtgatagccggaacgaagaattgtgatgattttgaatggccttggggatgtcatacagctgtcccattacctaatggacacattctttatttcaataatggttatgggcgtaacttcaaactggattttacagacaggaaaaatatttatacttgcggcatagaatatgaagtggatgaagtgaaccgtacggttcgccaagtttggcagtatggaaaagagcgtggtgccgcgtattttactccggcccgttccggggtgcaatatttggaacaaacgggtaacagattaatttgtccgggaatgagcaatgtgcttagcaatggcaatcgtggtgcacgtgtgacagaagtagatcctgaaacacaggatgttgtgtttgagttggaattggaagatgcgatttaccagcgggtttaccgtatgtctctttatcctgagaaccaataacaacactgtatagaatatgattgatttttgataaaatagtataattctagatgcttggatagcattcttttactgtaaaagatggattgataacaatgaaaagaaaataagatatgaacggatatttcaaaaaacaaatagaagcattgcgccaacgccatgaagcgttgttgcaacgtcctaatgaaatgcaggaagaaacgaacggtgtcatccgccgttatgtttatccggtactgacacgccagcatattcccctggaatggcgttatgacttcaaccctgccaccaacccttgttgtatggagcgtatcggctttaatgctaccatgaacagtggtgccctgaaatggaacggaaagtatctgatggtggtccgtgtggagggagcagaccggaagtcgttctttgccatagccgaaagccctaacggggtggacaatttccacttttggaaacgtccgctggtattgcccgatgtggatccggcggaaaccaatgtgtacgatatgcgtcttaccgctcaccaggatggatggatttatggtatcttttgcagcgaacgccatgatgacaaggcaccggtgggagatctgtcggcggcggtggcaaaggcgggaatcgtacgcacgcgcaatctggtggactgggaacggttgcccgacttgaaagcggcgagccaacagcgcaatgtggtgttgcatcccgaatttgtgaatgggaaatatgccctttacacccgtccgcaggatgattttattaatgccggaaatgggggaggaataggatgggcgttgatagacgacatcacccgggcggaggtgaaggaggaaatgataataaaccaccgttattatcacacgatcaaagaggtgaagaacggagagggaccgcaccccatccgcacctcccaaggatggctgcacctggcgcacggagtacgcggatgtgccgccggactgcgctatgtgctctatctctatatgaccgcagccgatgaaccgtggcgcgtcatagctgaaccagccggctatctgctggctccgctggcgggggaaagggtgggcgatgtgtccaatgtgcttttctcgaacggatggatagccgatgacgacggtacggtatacatctattatgcctccagcgacacgcggatgcacgtggcggtctctacggtggatcgcttggtggactactgtctgcacacgcctgccgacggattgcgttccgcagcttcagtggcagcggtgaacgcgctgatagatcgcaacgaggcatttctgaacgggtaaaatagaaggaatataaaggcattgataagataaagtcgtttttaatgcggaatggctgttttttaggtggaaagagaagtggataatgccatttattttcttgtcgaaagggaataaatggctaattttgtaattataaacccaaaatagatattgtatgaaaaagattgctttatgggctatgtgcatagccgtaatggtgttgtcgggttgccggaaggctccggaatggaaagcggaacatgtgtttgtcatcggtttggacggatggggcgcctacagtgtggaaaaggcggatatgccgaacgtgaaggcgttgatggatgccggatgctacacgttgaaaaaacgcagtgtacttccttcatccagtgctgtaaattgggcttccatgtttatgggggcaggtcctgaactgcacgggtacacggagtggggatcaagaacacccgaactaccctcgcgtgtgctgaacgagcatggcattttccccaccgtgttcagcgagttgcgcaaggcggctcccgatgccgagatgggcgtactgtatgaatgggatggtatcaagtatctggtagatacgctggctttgaaccatcatgcgcaggcacccgactataacacgcatcctacggctttgtgtgacatggcctgtgagtatattacgcagaagaaaccggtgttgagtgctttctgtttcgacaaccctgaccacgtggggcacggtgacggacacgatactccggcttattatgccaaactgagagaactggacggctatgtgggccgtattgtggatgccatcaaagaagcgggtatttatgaaaacagcatcattattgtcaccgctgatcatgggggaatcaataagggacatggcggaaagaccatggaggagatggaaacgccgttcattatcgccggaaagaacatcaagaaggggggagctttcgaagagagcatgatgcagtttgactgcgcgtctactatagcatctgttttcaatctggagcaaccgcaggtgtggataggacgccccatgacacaggtgtttgaataaaagatgaagcggatactatgaaattgcatatcgttgatattctgattatttgtgcttatctgatggttattgtcgccatcgggttgtttttgaaaaagaaggcggcaaagaatatggattcttattttttgggcggaaagtcgttgccgttttatatgttgggactgtcgaatgcatcgggcatgtttgatattaccggcaccatgctgatggtgtattgggcttttgcttatgggttcaaaagtctgtggattccatggttgtggcccgtgttcaatcaaattttcctgatggtctatctgtcggtgtggctccgccggagcaatgtgctgacgggcgccgaatggataaagacccgtttcgggcaggggcggggggctacgctctcgcatactattgtcattgtctttgctctgctcagcgtgctgggcttcttgagctacgggtttatcggaatcggcaagttcatggagatcttttttccgtgggaggtagtgtcgcagtatgtgccctgggatattccggtacaatatgtgcctcatttttacggcattttctttacggccattgctaccttctatgtgatgctgggcggtatgctcagcattgtgtggacggatgtggtgcagttcctcatcatgacggtggcgggtgtggtcattgccattatcgggatgaacatggtggctcctgaaatgatccgggaatttgtgcctgcagggtgggagtcgcctttcttcggctggacgctggacattgactggagtgaacggatgagtttgctgacggaacgcatggcggacgagccttacagcctgatgggtgtctttgtgatgatggcgttgctgaaagggatttttatgagcatggcgggacctgctccgaactatgacatgcagaagatcctgtcgtgcaagtcacccaaggaggcggcgctgatgagcggttcggtatcggtcattctgctgattccgcgttatctgatgattatggggtttgcgttgctggctatctatttctttaaagtggatggaggactggaacagatgacggctgtccacacggatttcgaaacaattcttcctcacctgattacgaagtatgtgccggtggggctggcgggtttattactggcaggattgctgtcggcattcatgtctacattcgcttctacggtgaatgcggcaccggcctatgtggtgaatgatatttatctgaagtatatcaacccaagggcttccgtcaggacacagatacgggcgagttacctcgtttcggtactggtggtggttatcagtacggtgatgggcttttttctgaaggacatcaacgagattttccagtggattgtgggcgcgttgttcggcggatatattgccgccaatgtgttgaaatggcactggtggcggtttaatggtgaagggtatttctggggaatgacttcgggtgtggtggctgccattgtgatgaagttcacggtgcccgattcgttggtactttattttttccccgtgttgttcggcatttcgctggtgggttgtatcgtgggtacgtactcggcacctcctactgacgaggagacgctggtggacttctatatccgggtacgtccgtgggggtggtggaaaccggtggcggccaaggcggtagcacgctatccgcaggtgacgcgcaaccgccatttcaagcgggatatgttcaatgtggcgattggtatcgtgtggcagtgctgtctcactattgtgcccatgtatctggtggtgcgcggtacggggggactcattgcgtcggtgttgctgctggtggtgaccaccgtggtgttgaaatatacctggtacaggccgttgtgcagggaagagaaggaatatgatgagttgatgaaacgtatcggaatggactgatagacaaaaaagggtaaatgtgtcaaaactaaaatggctaccccgcaaagttacagatcgtatttataacacttaaaaaagggtcgtatcaagctctgtattgagtaatgatacggccctttctttagccttttaggatgttcaaatgccagattataagttcatattttcaaaaacagagttttgacatcctctttttgtctgtcaatatcaaccggaaggtttagctcacttcgggcggctccagtatgcggctggcgtactcatgttgtagcggtagctcgacaccttgtttcatcaatattcttccggagaacattttgttgtccagtggcagcggacgggcatcttttccggtttagttccgtgatgcggtattgcttgtcggctttcagcctgtccatgcggaaacggggaacaatctgattgcaataatgctgaatcttgtaggcaagaacacggcatgttttttctgtggggtgtagagcatcagtgagaaagcacctctatcattgtaaggcgagatgagacggtatgataaattgcccagctgtatcatcggacggattttcttgtaggtaataatggcttcacgttttcgggaacggacaacggcagggaggtgttcggagtagctatcagaatatcttgttcctatacccggagcggaaaggaagagaagaggcataagtttgccggaagtagttttttcatgggatggtatttttttgaagaataatgatctgtatgtttggagttatgcaaaaatgaaagaagtttttggcattttatgatagaatattattcatgtggcactatgtgcgcattttatgtaattatgaggtgctttgccgcaataaatatcaaggaatctttttatctttgcgaatattggtaatcagtgcttaagtataaaaaaaggttatggaaaagagagataaagaggaaatgagccgcaggaagtttctgaagatagtaggcgtcagtgcggctgcatcggcggcagccctgtatggttgtgcatccgaagggaaaccggcttcatccgaggcttctgtattgggcgaagtgcctgtggataaaatgacgtatcgcgtttcccccaaaggggagcgtgtctcacttttaggatatggatgtatgcgctggccgttgaaacctgcaccggacagcgatggaaatgtgatagatcaggatgcggtgaatgaactggtggattatgctatcgctcatggagtgaattatttcgatacatctcctgtttattgccaagggttttctgaaagagccaccggtgcggccttgaaacgttatccccgcgaaaagctcttgattgcgacaaagatgtccaatttccaaaactatactcgtgagaattccatcaagatgtaccatcagtcgatgaaagaattgcagacggattatctggattattatttgcttcattccgtaggtggaggggaagggatcaagactttccatgaccgttatattgacaatggagttcttgactttttactaaaagagcgtgaagaaggccgtattcgtaatttgggatggtcatttcacggatcggtggaagtgtttgattatttgctgtcgctggatgtgaaatgggattttgtgcaaattcagatgaactatgtagattggcgccatgcttcgggtagaaatgttaacgcggaatatttgtatggagagttggccaagcgtggaattccggctgtgattatggagccgctgttgggaggacgtttgtctaaactgaacgaccacctggtggcgcgcttgaagcagcgtcgcccggagaacagtgtggcatcgtgggcgttccgttttgccggtacgtatcccaacgtgttgtgtgtgctgagtggaatgacttatatggaacatttgcaggataaccttcggacttattcgcccttggaacctttgaatgaggaagaaaaagagttcttggaagaaacagcccaattgatgctgaagttccctacgattccttgcaatgactgcaaatattgtatgccctgtccttacgggttggatattccggcgattctggtgcattataataaatgtgtcaacgaaggaaatgtgcctaaaagcagtcaggatgagaattaccgccgtgcacggcgtgctttcctgataggttatgatcgtagtgtgcccaaactgcggcaggcaagccattgtaccggatgtaaccagtgtaatccgcattgccctcaaagcattgatattcccaaagaactgcatcgcatagacgcatatgtggaacagttgaaacaagagactttataatggaatggataaacatgataaaataacgaatgcttatgttacgtaaaataagacttgccgccgcccttttgttctttacaatgatcacgttgctgtttttggattttactggaactgtgcatggttggtttggctggatggcgaaaatacagttccttcctgccgtgctggcattgaatgtgggggtggtgatagcccttgttttgttgactctgcttttggggcgtgtctattgttcggttatctgtccgttaggggtgtttcaagatatcatttcctgggtttcgggaaaggtaaagaagaatcgtttccgctactcgcctgctttgtcgtggttacgctatggggtattggcagtgtttgtcgtcgctttggtagcaggggcggtttcattggcggcgttgattgctccttacagtgcatacggccgtatcgtttctaacctgctgacacctttgtatcagtgggggaacaatgtacttgtcctatgggcggagcgtgtggacagttatgctttttattcggtagatgtttggatgaaaggtctttctacttttgcagttgcagtgggtactgtgattgtgctttttattttggcatggcgtggaggaagaacttattgcaataccatttgcccggtgggtacagtattgggattcttatctagatattcttattttaaaccggttattgatacgtctaaatgtaatggttgcggactttgtgctcgtaattgcaagtcttcctgcattaatcccaaagcacatgagattgattattcccgttgtgttgcttgtatggattgtctaggcaagtgccgccaaggggcaataaaatatgtatcggggcagatgcttctgaagaaacaggctccggcaagtgaaggagttggcaaacgggtttctcaggcgtctttaaacaaagaaaaggtagatactgcacggcgtgggttctttacggtttcggctttgattgctgcaagtgttgccgtaaaagctcaggaaaagaaagtggatggcggtctggctcctcttatagataagaaagttcccaagcgtgccactcctattgttcctgcgggagcattgagtttccgtcattttgcgcagcactgtacggcttgtcagctttgtgtgtcggtgtgccctaatcaggtattgcgtccgtccggtgatttgaaacatctgatgcagcccgagatgtcttacgaacgtggatattgtcgtcctgagtgtgcgaaatgtgcagaagtatgtcctactgatgctattcacttggctgatttgacagagaagtcatctgtacagattggtcatgctgtgtgggttgctcagaattgtatagtgaacacagatggggtaagttgtggaaattgtgcccgtcattgtcctacgggggctatcttgatggttcctaaagatgccgatgatggaaaatcacttaagataccggttgtgaatacagaacgttgcatcggttgtggcgcttgtgaaaatctttgtccgagccgcccgtttagtgctatttatgtagaaggtcatgagatgcatcgtattatctgaatgaaatagaaaggaagatggatgaattaatcagattgttgcatgaaggcggctattcctgtgttatcagaaaggaagagatccgtacttttacccaacgcggggtagccgatttatatgatttgctgaatcagcatccggtctttttgcatggagcgcaggttgctgacaaggtggtaggaaaagcagctgccgcattgatggtgctggggggtgtccgggaggtttatacggatatcatcagtgagcctgcattggctgtattgcacaaggcgaatattagggtggagtgtgttcaaatagtttctcgtatttggaacagaaaccggacaggttggtgtcctttggaaactctttgctatgagttggaatcgcctgaggctatgtatccggtgattcagaattttgtggaaaggatgaggggcttcggaagctaacttcgtggttcttgtcttgtttcaaatgtgctgatgatgctgtacgttcggagagtaaacgttttgcatataatcttaactaatgttgtctgtcagatggttttcttcgaaacttaatgaaattttgctaggaattcttaaatcttcattatctttgaagcataaaacaataagattatgagtgaccagataaaacaaatagctgagcgtctccagggattaagggacgttctggaactgactcctgatgaagtggctaaaagttgccagctttcagtggaagagtatttgggtatggaaagcggggagaaagatatttctgtcagtgctttacagaaaatagcccgtaaatacggtattgcattggatgtattaatgtttggtgaagaacctaagatgagttcttattttctgacccgttgtggttcaggagtgtcggtagaacggaccaaggcgtataaatatcagtcattggcttccggttttcgcgggcgtaaggctgatccttttattgtgactgtagaaccgaaaccggaaaatactccgattcattttaactcacatgagggacaagaattcaatttggttattgaaggaagaatgttacttaatataaatggaaaagaattgatcttgaatccaggtgacagtctttattttgattcttctattccacatggtatgatggcattggatgataagactgtgaaattcttggcagtaatattataataaattgagattaaaaagactgcgttgtcattgaccgcaactatttctaatttttggttctcaatttttaattgaataagattatggtagaaaaattcttagaacagaccacatttacctcacaagaggactttataaagaatttaaagattaaaatccctgaaaattttaattttggttatgatatagtagatgcctgggctgccgaagaacccgataagaaagcattgttatggactaatgataaaggggagcatatacaatatacttatgcagacttgaaaaagtatacggatatgactgcttcttattttcagagccttggtattggtcatggtgatatggtgatgcttattttaaagcgtcgttatgagttctggtactctattattgccttgcataagttaggagctgtggttattcctgcaactcatctgttgacaaaaaaggatatcgtgtatcgttgtaatgctgctgatatcaagatgattgtagctgcaggagaagatgtgataacaaagcatattatagatgccatgcccgattgtccttcagtaaaaaaactggtcagtgtaggaccggatattccggagggttttgaagattttcataaaggtattgaaaaagctgctccttttgtcaaaccggaacatcccaatacgaatgaagatacttcattaatgtatttcacttcgggcactacaggcgaacctaagatggtggcacatgattttacatatcctttgggacatattgtaactgccagtttctggcataatttgcatcgtgacagtcttcatcttaccattgccgatacaggttgggggaaagctgtttggggaaaactttatggacagatgatagcaggagccaatatttttgtgtatgatcatgagaaatttacaccggcagatattcttggaaagattcaggattatcatatcacttctttatgtgctcctcccactatttatcgttttttaattaaggaggacattagtaaatatgatctttcttctttggaatactgtactacggcgggagaggctttgaactattctgtatatgaaacgttcaagaaaatcacaggtattcgtctgatggaaggttttggacaaacggaaaccacgttgactttaggtacttttccctggatggagcctaaacctggaagtatgggggtacctaatcctcaatatgatatagatttgttgactcacgacgggcgttctgctgaagatggagaacaaggtcagattgttattcgtacagataggggtaaaccattgggattgttcaaagaatattatcgtgcttcggaattaacggaagatgcttggcatgatggtatttattatacaggtgatgtggcttggcgtgatgaggatggttatttttggtttgtaggtcgtgctgatgatgtgatcaagagttcgggttatcgtataggcccgttcgaggtggaaagtgctttgatgactcatccggctgttgtggaatgtgcgattaccggtgtgcctgatgaaatccgtggtcaggtggtaaaggcgacgattgtcctttctaaaacttttaagggtaaggaaggacctgagttggtaaaggagttacaagatcatgtgaagcgtgtgactgctccgtacaagtacccacgtgtcatagagtttgtagaagaacttccaaagaccatcagtggaaagattcgtcgcgtggaaatccgtgaaaaggataaataatcagttgtggactgatcggagttttattggtaaaataattaaaaatgaaaaaggttttacttcttgtgtttttaagtctgacctggttgtcagcaagtgcgcaagccttggttcctattacatggacagcctatggtctgacttttgaggctccaaaagggattttggtggaggaggatacagaggagacttttcttctgaacaattccaggttttatattaccattcagtctttggattcggatggtatgacaaaaagtgacttgaagagtgtattaaaagactatgccaatgatgacggggtgaaagaccagtcggctgtgcaggagtttgagttaccacagtttttcggtacttatttaaaaggaagctgcgaaacagatcattgcctttatgcttgtctgatgactaaggcggcaggtagtggattttatatatctattatctatagcaaggaaaatgaaaatattgccgaaaaaatactgaaaagttttacaatggaggaataaacaaaagagcgttaatgcttgtttcttagataagaaagcgttcaaaatttaccagaaaattactagattattaatagcaaatgaaaggactggcttcgtgagaaggtagtccttcttttttgtgtagttatgaatgtttagggaatctatgattcatgtgtaatatgctttgccgacatcagaatatcaaatgattttgggccataataagggacattcagaaaataatataagttagccaactaattcgtaatactttaagtatgcattagctggctaacttattattctatgaatgtttcaggttaaggcattaacgtccggtccaccataagggggtgatgatattatctgagcctcctaataactctacagcttgtttatagccttcggggtctgcattctccagactggaaggatatcgcatacgctgtggataaaattcccatttctgtccgtctttccaagaattaggattccagacattaaccatgtctgaaccggtcattgaactttcgtttgcaggaatctcaaagaatggtaatcccaaacggcggaaatccgaccacatttccaataccaaatacggagtttgtgcaatgaatttttgagtgataattttagtcagatggtcattcaatgcttttccatataacgttttagaagctgtaggatattcataagtaacagttttctgttctttgctgtatccatccacataagtcatttgttcagcagtcggttcagtggtatgatcaaatttgactgaagtacctacacgattatagttggtggaattcagataatcattcacatattcgctaacaccaaagtattcaaaactagctttaataccgttctcataggcttcttttgctgttgttccagtgttccaaccatacaatgaagcttctgctaacaagaaataagtttcccatgctgcaaagaatatgcgagatttgccctgacaatagtctttacccaacattggaagagtacagccggggccatatccatttgtcaccagttggttataagccaaggttggcgaccatccaccgcgcgaaccagcgggataaccattccaacaacgagttgcatcaatctttatttccccaggattatccttattaggaatcggattcccgttttcgtctactgtgtaaagaacgaaatctttagctgttctatcattatatttatctatgtagttctcagcattttcatcatcaggtaaacagaatatctttaatgcacgcggatcaagattttccggcataccatccagccaatattgtttagtaggattatctgtattagcaacataatgtctgtcatatttaatacctaaataattagctggtttaacataactagccaaatcggaacgttgttctgttactttaataccacctaaattagtcagaagattggcaactgttgaagaaagaacctgatcgtcaaatgaacgggtatatactccggaaaagacatcccatccatcattttcttttactgcaaacatatcatcagccgttaaaatcttgttacctttggccgcatcctcaaattcggcctgtgcagttgccttgtcgatgtttgataaacgcatggccagacgcatacggagtgaatttgcatatttctgccacttcacaggatcatattttacattgtcaaacgggtcgcatttaccttctgcctcaacaggcaggacagaggtgttgatagctgctgcggcttctttcaactcctttaaaatgaattcataatcatctttctctgagttgaaaacaggattttcccctaggaaactttcaataggataaggtccgaaattatcgacaaactcactgataagataggcacgccagatacgggcaaactgctttacgttcgggaaaaattctttttcatgtgcagtggtagtggccgcttcgagctggttctctactgctgtaatagccaacgtagcatttttaatactggaactgagatcaggataataataagcagatgtgtagtcatcactatagcggcctacgttcagaaaactcatttctccacaaattctggcagcactagcccaattatagactactacacgttctgcggtaccgggattcatctgtgcctgtcctatagaattattcaatgcatattgaggttttacatattcctcaccggcggctgtgggattggtattgacttcatcaaagtcagagcaggaaactaatccggcgcaaaagccaagccccaaaaataatttattcattgttttcattgttctttttcttttttatgattagaaaccaagagttacattaaacaggtaagaacgtgatgtcggagctgacgagttctccaaacctgttgcattagtacttgtagcatatactgattccggatcaatgccgtccaaatggcttgaaatcatccatacattattcacggtgaaaccaagcttaacctgttggaacggagtctttttcaacatagatgacgggaaacgataactcaaggcgatgttacgcaaacggatgttggtagcatcatagatataagcttccgaaataccggcgcggcctgtagccaaagctttgtaataacgttctaaagaaacactttgatcatttaccttataaccgttgccatctttgataactcccgctacaacgatatcctcacgtttaccgcctggagcagtacattcggcaataccactacgttgcaagttcatattggtgaatgagaaaatatcgccaccaaaacgtccgtcaatcaggaaactaagtgtgaagtttttataattaaatgtatttgtccatcctaataggaagtcaggctgttgttcaccaatcttatgcttgtcactagtggcctgtggcagtcctgattcattgagtaataattgtcctttaaattctccttcttctactcgttgatatttggtaccccagatttcaccataagcacctcccgcaactgcataaacctgtaatgcgtcagaacctcctaaagcatactgcatacctggttttcccggtaataattcaataatcttactcttgttctgagagaagttcaactgagtatcccaactaaattgagctgtttcgatagggcgtgcattcaacatgatttcaataccggtattttgaatgttacctgcatttactttcatgttatcataaccggaaaggttatttaaaggaatattcattaactggcgttttgcgtttgtcttgtaccatgcaaagtcaactcctaaacggttattgaagaatttcaattcagcaccggcttcccaagaagtaatcaactcgctgcgtacatctgcatcgtatttggtttttccttgtccggcagttgtattgccattagggtctgaaccaatactatatgtattatataactgatatgcatccatatcgttacctacttgtgcaaaagatgcacgtgctttagcataagtaaaccattcgggcatgcctttgcctactttacccaccatatcactgatcacccatgacaatgaaacagacggatagaagaatgaacggttttctttattcaaagctgatgaccagtcattacggaaagttgcatccaagaatgcccaaccattatagttgatcccaagagttccatacaaagaattgatttttttatgaatataggtttcggttattgacaaatcttttttgtcaccattggctaaagagaataaatcgggagcagtcaattttcccatagcattatccaaacctgtagattttctttccattaagttaccaccaaaagagaaattaccaccaaattttccaaacaattcatctttatggccactgatcaaaaagctgaaattattttcgaagaactttttctcactagtgctgtaacggctgttcttattattagtaggacttcctgcatacaatttctcttcaccctcagtgaaatacatatcactaccggctttgatttcagcatccagccaatctgtaaatttgtacttcaatgatccgttcatcaggaaacgattgcgactgtctttattgggattataatctttagaccaataagggttgataccccctttactccaccagatcatttcgccgaattcgtctttgacagggctggaaaagtcacggatgtcaatagtcgtaggcatattgaaaatagtataaaatgcattattcccacgtgcaccactgatagggcggttttctgcgagggtattgatgtattgtacttttgcatcaatgctccaacgatcatctttaccaaaagtagaagatgcacgcaaagttaagtttgtacggcttaagttagcacccggtatcatgctggagtcatccatacgattcaatgaggtgtaaatggatgttttatcatactgctgctggaatgatatgctttctgataagttcacacctgtatcaaagaaattttttacgttatcaaagatttgcatatttgcagttgtaccatcccattttgtatagctttgccctgttacttcaggaccccagctatagccgttagttgagtcgaacacgccattctcaccttgtccaaaggctttttggcgtttagggagcataaatgttgtctcagcggaaactgaaccagagatagtgatacccaaaccttcacgctttgttccttttttagttgtaatcaaaataacaccattaccggcacgagaaccataaagtgcagcagctgacgcacctttcaacacagacatggactcaatatcttcagcattaatatctgaaagtccattacccatatccaatgtcgggttatcaatatcattattacttgctcctgtaaagttatccattggcacaccatcgacaacaattaacggctggttcaaacctgttacagaattcgcaccacgaagctggattttggaagaaccgccaggaccattacttgaacggataatctggacacctgaaactttacctgtcaaagcatttgcgaggttcgtttcacgagcttcaagtaacgcgtcaccttttacctcctgcatggcataacccagtgcttttttctcacgtttgataccaagagcagtcactacaacttcacccaatgtttgtgtgtcatcctgtaaagttacattcatgggttgtccatcccaaggaatctctactgtttgataacctacaaatgaaatttgaatgatatccccttttttcacattggataaagagaagtcgccatcaagtccggttatcgtaccattagtcgtacctttcactactacagacgcaccgataacggtttcacctgtagcgtctactacaactcctgtacaagctccattttgttgtgtgattttcacatcggcaacgccgggattggcgaccgcgtatgctgctcctgtagaggcacccattaggaacagcaacatactgactgattttagtcgttttaacatagctgtgattttttttttaagtttattgaaaatcaagtaattccgtttccttagttccttcagaactactcttgcagctatatgtctgataatcagagtatatgtactttggtaattttaagatgatctttgtccttgaatttacaaacaggaaataaatttgcgatttctaccagttttctactagctaccatcccgttaccatagtcaaatttaaattaggataggattaataaatattgtattgtaatactttttattctgtcaccacatatcgctggacttcaatattatatggtgacagaactttcagtatttcctcgaaatggtttatcagttagagccggttcagcagatactggtcgccatagcgggtatgtaatttcttcactcccatcagagccaaatgttttccgaaggctctcatcttgacatcacgcatggtttcaggactggcctttttcatcacttcataaatctggccgatagtccatctttgaaacttctcctcatctcggggcagactgaagcagctataaaagaggctttcctctatgggacggcgcaaaaatgcgtcattacgcaagctgacagcctgttcttctttgggtgagagccaatagcggcggttatgttttagttcatctcttaactgagcataaagttgtttataattgatgcgaggcaaacggatactccctttggtcatcaccggataaaaacggcggttaccggaagaatcggtcagcagatcgcaaaaattggaggtgccaataaatgagctaaggcgcggttgctggctatagctgctttgaaacggacggcgcatactaagaccgctcatttggactagattcttcaaccgtgccagtttaccttcttccatccgattgaattcgtctatattgataagagccaaagagcgcattttgcgcagggtatccccctcgcgggtcacatcgaagtcatcggtataatatccacgtaacgctggtggaaggagcgaccggcaaaaggtagacttcttcaggccctgaaggggattaaccaaaatgggaatcaggcagttgccatgcatccggtttttaccgctccattgcatcaccatgcccagcatccagatatgaaacacctccacccattgcgtttcatcgcttaccgagtgtgccagctcgcttactctgtcgtgcccgtcccagtgtggcagatgttccaaataggctgtcacggggtgaaaagaaggaatgcgtgacgaacccagataacggcgcatatcacggtccatacagttcacgccttcctctattgcattaataaccaatgtgttgaattctcgctcatccaccacacggtatttatcgaacttgtgcttgtcatgaaattcgcattgttctgttatttggttgtaacgaaaggaataatgagtggtgaggaacgaatcaagccctttcatggcttgtttcagttttgagtctttttctttttccattaaatctgtttttttattgatttgaggtgtgaagatagttctgcaaaacagggttttgcaagaactttgcccgacaaattaaaataaatccaacgtgtgaaacatttatggtagaatctttgcaagaggacgaaagaatccgtaccttcgtccggaagaatctgggttctcactgacgtgaagttgcctactcactttagtgaagagccattgccacacgggtgaaactgccgcttcactaaggtgaagcaacagaatgttctgtaagtttgcacgataacatcctataaataaaacaaatacatagtacattatgtcagacattaaatttgatatctatgaatctccggcaaatgacggggaaaagaaaaaataccatgtgagaaacaccaacaagcagaccatccactcgaaggacttgatacacgaggctacgctttatacttcagtaagccgttcggactgggcggcagtggtagagggactgatagatattctgtccgagaaattaggtgacggcaaacgaatccatatcaacggattagggtatttctctgtcagtatcggctccacagaaagtgaaaatcctaagaagatgacccgtggcacagtacagataacaggagtcaacttccagcctgagaaaagtttcaagaagagtattataagccgggcacattttgtaagagaacgatacaaggtgcacacggtggacttgtcgcctatcgaagtggacgggctgctgagtgaatattttaaagatcatcgcagtatcacctgcgcccggatgcagcaggtctgcggaatgacccgttctaccgcataccgccgcctacaggcactgacccaaggagcccatccgtcattacaacgcgagggctacaaaaatgccactgcctacataccggttaaagggcattacggacgttcctacacggcagatcgctggtaacgagccggatagggtgaagggagaattttgtgtttcatgtaaaacgaattgttatatcatactttaaaataagaaaaaatgaaaagaaccatcttgaaaaacgtaggaatcggcttgtgcttcctgcttagcaccgggacggtctgcgcgcagaactaccctggaaaagtgaagaatgcacaaggtatcgaggtgacctatcaatcgaattacaaagggaaagcccggccgggacatctgttgatgaccgtgtccggtgaccgcgtatcattgaccaacgtatggccggagcaaaacgactgtcccaatccccacccggaagacaaaacacctgtaaccggcagttacatcgactacaccacccggcaggcataccgcagggctgaactacctaacggacaagtgatatctgcggtcactcccttcgaattcggcaaaggtttcacgcaaacgggcgaaggaaaacacttagggatgaactgcaaaattttgcgcacatccatcaattccaacaccatcgaggtgtggtataccaacgacatcccttttcgtggtactccgcaagccaatgtgggtgtacctgacggattggtactgagagtcgtgcgaaacggtgacatgattcaggaagccacccatattaccccgctgaagaaaggaaaggatgtgttgccacagtcgtggggggaaagcatggatgcggccgactaccaatataccatcaaccaaagcggagttatcacaattccggtcttcgaccagcagagcatctgcttcaacaacgctaaattgcccgaagtactggaggatggcgtacaatacagtgccggaggcggcaccatcctgttgaagaaagtgaagctgcccgactatgtgaagaatcgtaccgtctttgcggaagttgtccaatactcggacggtgatgcttacgaccgcaccggttctgtctttctgataccggaaggcaagcagctgtcttttcttgatgccatacgtgatttgaagaaagttccctctttccgctcggaaaatacggactaccacgggctgatttccacagcggagtatgatgtgcctttagagttgatgcgtttcttcaccggtttcggtgtgcgcaagttcaattataataaggtgaaggggcaggactgggtggattccgtactttacaaaatggaggtaactccactggccgaaaaattggaaggggaagcttggattggcgcttacatcggcaactgggatgccaaaggacatcgtctgtcgttgaaactgaagtattatcctgatgaagaacatcgagtttataatactcttccgctgttcaatacagtgaattatctggagcaggcaggacagccttatccgattttcatgcgtcaggattctcttaccgtaaagttcaccttgaaggagcctgccaagaacgcccgtctgtactacctcaccacgggacatggcggttggggaggcggtgatgagttcaaccagaaaccgaacactctctatttggacggtgaaaaggtgatctctttcgtaccttggcgggatgattgtggaacttatcgtaactggaatccttgttcgggtaatttctccaatggactgagttcttccgacttgagccgttccaactggtgtccgggtacggtgaccaatcccgaatacatctatttgggtgatctggaagcgggtgaacacagcattaccgtaaaaataccacagggtgctcccgaaggaggaagcaatagttattggtgtatctcgggtacgcttatttattaatgtaaattcctttgtcctgcgataacagaaatgtttctgtcaccgcaggacaaggaatgttccaacttttctatctcctcaaaggacaatcttgttcttgtgcaagttgtcacatgggcaagttcaaggacttaaaattacagtctacagtttgtttggacttctttccctcttccgtccttcctttcatcttttgattgttgtctgcaatacttatatataaaaaggtatattttctctagcaatacaccaacggcatggactgacatcaccttttttcctttggttcttatcccaatatacgttacctgttttctaccgactaccaaacaaagggtaaatattcgatgaaaaaacaatataaatcatttcaagaaacttctgtgacagttagcagttctctctttaaataaggtgcttcaggcatctcaaacgttaaaaatcagggcatattaaaaatatttttcaagagaccctttatatatattaaaattgttatatatttgcaccgttaatctaaattaaattgaaaaacatagttctgaaggaactaatgaaacggaattacttgattttcaataaactttaaaaaatcacagctatgttaaaacgactaaaatcagtcagtatgttgctgttcctaatgggtgcctctacaggagcagcatacgcggtcgccaatcccggcgttgccgatgtgaaaatcacacaacagacagggacgtgtaagggagtcgtagtagatgctacaggtgaaaccgttatcggtgcgtctgtagtagtgaaaggtacgaccaatggtactattaccggtattgatggtgacttttccttgtcaggtgttaaacaaggagatgttatccaagtttcctttgtgggatatcttacccaagagattaaatttaaaggagaatctttaaaaattattcttcaagaagattcacaaactcttcaagaagtggttgtagtaggttatggtggtgttcagaaagccaaaacaatgactgcatctgccgctaccgtaaagatgtccgaattggcaaagttaccggttgcttctatgtccgaagggttgggaggacgtgttaccggtgtggtaactcaacaggcttccggtgcgccgggtgaaaacgccagaatttggattcgaggcggtgaaaatatcttgtatgtcattgacgatgtcgtgatggattcggggcaaggtaatgagtttttcaatcgcttgcgtccggatgatatcgcttccatgtcaatcttgaaagacgctgctgcaactgccgtatatggtccgcgtgccgctaatggtgtagtagtgattgctaccaagcgtggacaggaaggcgcgcctaccattactttaaaccaaaaagtgtctatcatgactcctgcttatcgtcccaaaggattgagtagttacgagtacgcattggcacgtaatgaagcggaattggcaagtttccaggagagtccgacttttaatgatacagaactttctaaatattatatgggcgatctgtggcagaaaggatacggatttgaagaaatccgtaacctggtgaacgaaagatataatttagggtattctttgcaagacatcaacgacttgttcgatccgttaaagacacaaggtaaaaatatccaggactactattcttcttacgacccatgggatatgtttgatcatacacagccaatgtatcaaactaatgtcagcctgcgtggtggtggcgaacgtatcaaatattattcaagtttgggatatatgaagcaaaatggtgtcagtgataaatattcatacgaacaggtgaacatgattttgaacacagacgccatgttgttgagcgacaagagtttgaaatttactttcaacttgaacggtaatacttctaacaacaataaacctgccgatggtgaaggtgtgttcaacaatgccatgtatggtgactggatgcctaagaggccggctgcctggagtaccggactgccaagaaagggatctgtggaggcgcagttgaacaacggtttcaacaatacagaatcttatcgcttccagatgaatgcagctttgaaatggagtgtgccttgggtggaaggcttgtctgcacaggctagcttgaacttcactacttcttattatcatcagcgtcattttaaccatgatcaggaaggcgtttatgacaatccgtatgctactgccgtttcttcctataatcctgaaaacgccaacttatatgaaaaatggaataagtataagttgttgaccggcattttccagattgattatacccgttctttcggaaagcataatctatctgctatggtgaactatcaaagtcaggtaagaaagagcaattggacggatgcaaagaaaaaaggatatcctaccactttggctccgcagcttgatctaggcggtacattagtttctgccggtggctctgctgaagaatggggttctgcttcttacatcgggcgttttacttacgactatgacaataagtacctgttccaatacagtgctaactacaatggttctttgagttatagcccggataaacgttggggatattttcaggctttctcattgggttgggtgatgtccgatgaagtttggttcaagaatttggtgaatccgaacattgttaatatgataaaattacgtggcggatttggattggtaggtaatgaagtgggaagtccattttctttccttacccaatatgcgcagagttcaaaccgcatattgtttggagaaaatatggcttctaatgtaggatggtacgagtctgatgtagcaaacaatttacaatggtccagcagtaagcagtatggtattggtctggatttcggctttttgaaagaccgcttgacaggatcattcgatacgtttttatatttgaacaaaggagatgtgatggacatgactgatgatatgattcgggtagatattttaggtatgccgaacactccgaaaattaatgctccgtacactacttcacgaaaaggaggtttcgaagtttcgttgaactggcaagacaagattggcaaagtcggttatcgtgtaggggtaaactattcttattgggatgaacgggtgactcgccatagcagctctgattcggactggtggactccgacattcgacaatatcggcaaacgtccttatgtaacaaacggagaatctataacatatccttatgggttgaagaccaatggattacacgggtcatggcaaaaaatgtataattccttattacacgctaacaataatatgactttgggaactccggctttggtggacttaaatggtgatggtcgtgtaaatgattactatgtgttcaatgcggaagggtctactccacatactcaatttggtgtaactttaggagccgactggaacggattcgatctggaactgttcttccaaggagcaaccggtgcaaggggagctatgccttctccgctccgcagccaacaaagctatatgtggaattacggacaatacgcgttccagaatgcatatacaccgagcaaccctgatgtagacgccgctcttccaactccggttcctgaaggcaatggatttggatatagttacattgacatctggtcttttgatgcctcttacctgaaactgaaaaatatcagtttacgttatgacttaaaacgttcggttttgaaaaatctaccagttattcaaggattggatttaagtttcgttgtgactaacgcatttacttggactaaaaaatcttatccactgaaagatttgcaggatcccgaattcattactacaggtgcttctatctataataacaatggtactttgggaagctatcctacccagcgttcttatactttgggcgtaacagtaactttataaaacttggttaatatgaaacgtaaaaataaaacaactaaatatattctggccgggttatttctttcttcgatgatgggagtaacaactgcatgtgatccgttaggaatagaacctacaacaaaagtggatgaagaacgcttttgggaaaatcctcaattggctcgttcttatgtgaacaatttctatttcatatcccaatcggcatctggtgacaccttccagtcagaacagtggtcagataactgtcagggaaactatgaacaggactgggatacgtatcgacagtacaattttaacaaacgtacttatgatgaaaataatggtatcacttgtttcagcgccccatggagtggagcttataaaaacattcgtgctgtaaatcttggaattgaaaaaatttcttccagcagcatattgacagaagctcagaagaaccaattcttgggtgaatgttactttttccgtgcttttatttattttgacatggaaaagttttggggaagcgttccttatgtagacaaagcgttaacgattgaagatgaaacctatttgcctcgtaccaaacgcgaaactattttcgacaatattctagacgatttgcagaaatccgtagattattttaaagcttatggtggaacgcatacgcttggtatggtaaatgaagatgtagctaacgcatacatttcgcgcgtggctttatatgcagccaatgcggccgatgcttcagccaaaggtctatattcggatgatgctgaaggcttgttcaagtttgagaagaatgcaaatcattattatgaattggcttataatgcagctaaaggattgataggcaagtacagtttggaaccgaattatgaggatctgttcacaaaaacagagtcacatacaagcgttgagtcaatttggccggtcatgtttaaagaaaaccaacgtagtggtttcaatccaactgcaaagaacggacctgacgggaattattatggagcaaccgaagatgcgacttattcttacgggcgtcgttcaggtttatttcctacacaggatttggtagactgttatttacagaaagatgacgctgatggcaaatggaaaaattggtgggaaacttcacaggcaaaagccatgggaatccatagaaatgcagaaggagaattagaaggagaatctgctaattatcgcgatatgttcaagaatcgcgatagccgcttctattccacagttacttacgatggagcatatatgggaccggaagaagaacgttatattattcaaacttggattgacaatactacactagatgaaaagaccttaaaatacagtgctttacattctgggtatagagtgatggaaaatttaaattccgcaccaatcaacagagcttccgcacaaacaataactggttattattcaaggaagtactctcagtttaataaaatcaatacggacgggactttggattttgacacccagcgtcagacttgctatttcaatgtacggtatgcggaagtgttgctgaattgtgccgaggcaagtattaaactaggcaagaccgatgcggcaggctatatcaatgaaatccgtaatcgtgccggattgcctaattatgacggcaatgatttgtggaatgaaatgaaactgcaacgtcgtttggaatttgcatttgaatgtccgggcttccgttatttcgatttattgcgttggggggaagcagaaggcaaaacgactattgaagagttgaatactccttccagaggattatggattttccgtaaaggtatggaaagcgaaaaggctggtgagaatggttatcctgtagagccgggtggtgaaggatattttactcctaaattccagacttttgagatgccgtattcttattatgaaagaaagtttgatgatgcaagatactactttgtaccattttcacagtccatgttgagagactatacacaattgcaacagaatccgggatggaaaaacttcaactataacaattaaaaaaagatagttatgatgaataaattgctaaataaaatatgtataggtgcagctgtgttgtgcagtgcatcagttatttctagttgtactgccggattgacttatgaagaggcaccggaatctgtttattcagaagtaggggtaagcaaaatcgagttaaaagcccgggaattgtttaatgacaagatttatgcagttaactggaacaaatgggtggacaattatattgatactcgtttgattggaagttctgacgtttttacgtgggttaacagaacgggggctccctataccatgccggatgggaaagttgtggctgccggagaatcaataaaagtggaaggttcggaaacaatagaatccgatagcagtgcgcctgatggcaaggtgtatgtattaaacgtatatgccgcttcggatgtacaatattcgacagctaacaaggggttcttgtttgatggcagcaagttctccggtgactttgaattggtgaatcctgttgataaccgttcacaatatgtagttcttcctgttagaaagaatgaaatcataggtgaactttatctggtaagctattctgtctgtacggtagaacccgtaggtgactctcctaaattgggtatgccgggagattttaccaagcctcgtcgttatctggtgaagaatatcgctcatcgccctgctggagtggagcaacatcagcgtatgtatgaagtacgtgttactttccttccgtaacgcaggtgaattcttttttataataaatgaaagggtgggcttcaggctcaccctttcttgagataaacaattaactgaaaatatatgagactgattttatgttggttagggatatggatattctgtgtgggtctgtttgcgcaaaatactaaggacaattcctcttatctgtttgatgaatttcaagattgcttgattgtatataaagatggaagacagtttacggctccggttaattatgacctgataaagaagcattatgtctttaaagatccggaacaacaagaaaaggagttttctgatccggaattgatagcggtgcttcgcataggcaacagaagtttcttgataggaaagcaagaagcggtagaggtaatccaagctcagcccaaattcaatgtaatctatacaggtgatacacgaagagcccccaaaaagatttcgtatggaggaactacacaaacggcttccgtggataactattcaggattaacaggtacagggttgtccggtggcatacaggacgcccaacgtatcgttaccggaattaataaaacctacgaagttggtgtaggtaaaaaaacgaaacgcttttataacaagaagagttttttaaagcttttccctaaaaaacaacaagtccgatggaaccgatacatcgaagaaaataagatagatttcggttctgtggatcaggtgttcaagctctttcaagtttctatttcacactaagcattttcgcggtcacagaaatagtcgggtccttggtaaccggttattaaaaatggattagtaggaatattcttcattgctgtttttatgttacataaaacatgtaacgcaaataacgcaataaagtttggattgagcaaatatgagagttgtatttttgtgttgcccattgtaccatgctctgacttgacatggtccatggcaataatttaatatggcagttacaagatatctaaagcagaagttatgcagataatgatcatgtttcatggataaggacatgatacctggagcattatgatcctttggaaagcatcaggagcagaaaacaggaagagggtatatagccggagccggctgttataccctcttcctgtaatgaggtagattccttatttcatcttatacaccaaagttccacccttcaaaatatcttcatgcgagatataattctttgtatagggttcaccgttcagtgtgatgctgtcaatgtacttgtgttcctttgacaatccttcggcaatgatcgtgaaagtctttccgtcggccagattcaaaacgatttcaggcagctgcggagcgccgaagacataattgccacttaccggatctaccggatagaaccccatagccgagaacatataccatgctgacatctgtccgcagtcgtcattgccacagagtccgtcgggttcgggacgatattgcgtatcaaagatttcacggatcagttcctgggtacgttcggggcggcctgccaacgtatataaataagtaatgtgatgactgggttcgttgccgtgtgcatattgaccgatcaagccggtaacatctgcctgggtggtttccagtttcaaggtgaacaaagaatccaatttgtttaagaatgcctgttctccgccgaataactcaataagccccggcacatcatgttgcacatgccaggtgtactgccatgcattaccttcggtatagtctccaccggtactttccatgtgggcaacctgactagggttgaagggagatttccaacttccgtcagcattacggggacgcatgaactgcgtttctttatcaaacaggttcttataaaaatcggcacgtttggcaaaataagcggcatcttcctctttacccatacgttgggccatatcggctgcggcataatcgtcatataccgactccagtgtggaggatactgattctgtcttaatcaagtctgtagggaaataaccgtatttcatataagtttcccaatcggatttcagtttatgagatacggtctgggtatttttgatagcattgaaggcacgttcggcgtcaaaaccccggaagcctttgcgatacgcttcagcgataactgaaacaccgtggttgccaatcatggtatatgtttcttttccccaaagtccccagataggcaggaagccctgtacttcagcctgttctaccaatgaattgacgaatccgtctactttttcaggaaccattaaggtgtaaaacgggtgggcggcgcgataagtgtcccataaggagaaagtggaataaaaagctccgttaccggctttaacgatggaatcggctgcattacggtaccatccgtctacgtccgagatttggttgggctgtatcagggcatggtagaagctggtatagaagttggtcttctcgtcatccgtaccggttacttcaatgcggctcagataattgttccattcgttgtgggctgcttgcttcactccttcaaaattccagtcggctatttccgcttccatattcttcttggctccatccacgccggtggtggacatggctactttcatcagcagttcctctcccggcttcatgtcaaaagtagcgatgatgcgtttccctttttcagtttcggccatgggcagatacagggtatctatgacgggacgattgaacttcataacaaaaaagtaatcctggttcacccatacgctgttgcgtacatgtccggtcaaggtttgtgcatcttcccaattggtttcgcaactttgtacttgcgaatggtattggttttcgttccacgcaggtccgtgctgaaggtcaatcaatacagatgccgagtcggcgttatgataggtataacggtgcagggcggcatggggagaggcggtcagttcggccttcacgccggggtcggtcagctctacggtgtagtatccgggagtcgctgcttccttgtctttggggaagtggctgcgataagcgtcccaggcacgggcgcgtgttccggtaaccggcatcaccaggatgtctcccaggtccatacaccctgttccattaaggtgtgtctgggtaaatccccatatcagggagtcggtgtacacatattccgagcaatatctccagccgacagctccggttacggggcttgtctggatcatgccgaaaggacggcaggcaccgggaaaggtatgtccgttgtctgctgctccgatgaacgtgttaacatactgcgtgtagtcagtttcgcctgtcttctgctgtgttgtggaacagccgaagagcgagcctgccaatacaaatgcgcaaaggatagaattggttttcttcatagattcgcaattaataaatattttgcgtaaagataaagagttttctggaaaaatgggtcaagaaatcaaaacaagaaacgaattaataagaagtaaatgaatatctttgcatctcttaaattaataaacgacatgaaaaaccttagtttgggatctctcatgaggatactctctgcattcattttccttttatcgaatcttctttagattaatccgaaatgtttcaacgcattggctattccgtcttcatctacggaggtggtcacatagtcggccacagcttttacatgaggttcggcgtttcccatagctatccctgtggctacgtgtttcagcatgggaatatcattgccgccgtcaccgaaagccatggtgtctttcaggtcaatgtcaaaatatgccagcaccttgtctattcccgtacttttactgttgccccgtgcaatgatgtcggcaaacaatggataccagcgcattggctcgcaatgggtcagcactttgccgaatatatctgtttctttttcctcttcggccgtaaagtaccccattatttgcaggatgtcttttccacgggcttcttctatggaggcgacagggggaacaggaatttcaatcagatcggaaacagcctgtactctgtcattcacctcagtgacgaacatttcattgccgtatgcaaaaacgaaaggtaccggatggctctgttggaaagtgataagccgttcaatgtcttcttgcgggatgcaacctttataaatgggccggtggccggcggtaaagcaatagcttccgtttacggtgatatacccgtcaaactctaagtcacccaggttgtttattaaacattgtgggcgtccggtagcaataaagattttaatgcttttatcacggagtgcctttaatgcttcttgggtcgaagcaggaatcttatgtgttttaaaagaaaccagtgtaccgtcaatatcgaaaaaaatagctttaaccatacgtttacctattgaatattatcgttatatattttcattttgcaaagatgagaattaaaatacatgcacacaaatgcgataaaggttaatttttggcttatttgactttacagattgattttaatatctatatttgtgtttctaaaataacaagagaaatggcagttcagtttacaagaatagcagtaaagatcggtagtaatgtgttggcgcgtaaagacggtacgctggatgtgacgcgtatgtcggcattggtagaccaggtggcggaattgcgcaaagccggggtggaagtcattctgatttcatccggggcggtagcttcgggacgcagcgagatcaagccttccaagaaattggatagcgtggagcaaaggcagcttttctcggcggtgggccaggcaaaactgatcaaccggtactatgaactgtttcgcgaacacggcatccctgtggggcaggtgctgactacgaaagaaagtttcggcacgcgccgtcattacctgaaccagcgcaactgcatgatggtgatgctggagaacggtgtcatacctatcgtaaatgagaatgataccatttcggtcactgaactgatgtttacagacaatgacgagctttcgggaatgatcgcttccatgatggatatgcaggcgttaatcatactgagcaatattgacggcatatacaatggttctccttctaaccccggtacgcaggtgatacgggaggtggagcagggaaaggatctttcggactatatacagacggagaaatcgggattcggccggggcggcatgctgaccaagactaccattgcccgcaaggtggccgatgagggcattaccgtcattatagccaacggcaagaaagaccatattctggtcgatttgctgcaacatccggcagagacggtttgtacgcgctttattccggcagaaggcggagtatccagcgtgaaaaagtggattgcccatagcgaaggctttgccaaaggcgagctgcatttgaacgaacaggccgtgaaagtgttgaaaggacagaaggcggtaagcctgcttcctgtgggagtggtccgcatagaaggggaatttgaaaaagatgatatagtgaaaatcatagaccaccggggcaggcagataggagtgggacgcatcggattcgattcggcagaagcgcgtgcattgcaggggaaacatggacagaaacctatggtacactatgattatttgtatttggactgatgcggtgtggtaatgatttagataaaatgaagtgactatggaacagataaaagatatttttaaacaggtgcggcaggcaaaaggatctcttgctttctgcaaggaggagatcatcaatgacaccttgtatgcattggccgacagggtggaggctgctacggaccggattctggaagagaacgccaaggatctggcggcgatggatccgtcgaatcccaaatatgaccgtctcaaactgacggcggaacgtattcacgccatagcccaaggcatacggcaggtagccacgctgccttctccatcgggaaggatactgagccagaccgtgcgtcccaatggcatgaagctgaccaaggtaagtgtgcctttcggggtgataggcattatttatgaagctcgtcctaatgtgactttggatgtgtttgcactttgtttcaaatccggcaacgcctgtatattaaagggggggagcgatgccgatttctccaaccgtatcctggtggagattatccggaataccttgctggatgtagcccacttgtctccttatctggtggcattgttgccggcaggacatgattcggccgacgcgctgctccatgcccgcggctatgtggatctgattatcccccgcggcggcaaggggctgatagactatgtgcggcagaacgccacgattcccgttatcgagacaggagccggtgtgtgtcacgtttattttgacaaggagggtgatgtggcgaaaggagccgccattatccgcaacgccaagacacgccgtgtcagcgtgtgcaatgccttggactgtctgattatagatgtgaaccggctgaccgacctttccactctttgtagcggcttgcagcaggacaacgtggaaatctatgccgatgacttgtgttacaattatctgaagacttcttacccttcccacttgctgaaacatgcttctacggatactttcggaacagagtttctggactacaaaatggcagtgacggcgactatgaccatacaggcggctgtggcccacatttctatctatggttcgggacatagtgaatgtattgtgacggagaatgactgggcggccgattattttatgaagatggtggatgcggcttgtgtctatgtgaatgtgcctacttcgttcaccgatggaggtgagttcggactgggagcggaaataggtatcagcacgcagaagcttcacgcccgtggtccgatgggactggaggaactgaacacatacaagtggattattcagggggatggacaaataagacaataatactataaatgaaaaaattatgagatactttacaaacgtacacgatttgggcgacttgaagagtgcccttgccgaagctttcgaaatcaagaaagaccgctacaaatatgaaaccctgggaaagcataagacttgcctgctgattttcttcaacaacagtctgcgtacccgtttgagcacccagaaggcagcccgtaacttgggcatggatgtgattgtgcttgatgtgaaccaaggtgcatggaagctggaaactgagcgcggtgtcattatggatggcgacaagagtgaacatttactggaggctattccggtgatggcttcttattgtgatatcatcggtgtgcgttcgttcgctcattttgagaaccgcgaggatgattataccgaaaagattctgaatcagttcatcaagtattccggcaagcctgtattctccatggaagccgctaccggtcatccgttgcaggctttcgccgacctgattactatcgaggagtataagaagaaagaccgtcccaaggtggtcttgacttgggcgccgcatccgcgtgcattgcctcaggccgttcccaactcgtttgccgactggatgaacgaggccgatgtggattttgtcatcactcatcccgaaggctatgagctggacccgaagtttgtccgtggagcgaaggtggaatacaaccagatgaaagcctttgaaggggctgactttatctatgccaagaactgggcatgtcccggtgtcacccgtcctgccgactatggaaagatcctgagcaaggatatgaactggacggtagatgcagcgcacatggcagtgacaaacgatgctttctttatgcattgtctgccggtgagaagaaacatgattgtgaccgatgaggtgattgaagcgcctacttcgttggttattcctgaagcggccaaccgggaaatttctgctacagttgttttaaagagaatgctggaagggttggaataaccggcagtcggaatgacgtattcttccttttcaatttatcgtttcaccttagtgatgaaaccgtttcaccttagtgatgaaaattgatcaccttagtgataaaacttcatcactaaggtgaaacgataaacaggaaagggtagcgcaacgatttctatcggacgaaaaactgtgtgtatccttggcttgactatataagatagcgcgtggcaagattgccattcaagaggaaaaggtctcgcttcggaaatagaagaccgggcggggggagtctgggacaaacttacagagatggtaagcgtctccgcgattctatcttgtcgcccttttttcattcttatatttttgccatatataaaaatgaggcattatggatttagcagaaaatcgatttggaaaaacctggaaacatttccttgaagtattgaaagtagactacaattgttctttagccgatgtttgccgtgatcagcataccactcttggaggtatgagttcctggatgtccagacggggttatagcgttaaacaagccaaggcggatgtggtccgtgattattatggcggcgttgaaccctcccgaccgacaacttcctctccttcgttcactcaaatagcccccgtcatgttgtcggaagaagagtttagtctttccgggatcacaatcacctttaacagcggaacgaccatttcggtcaaacgggccactcccgggggtattattaaaatgttacgcgattacgaaagaaaggagggggatccatgtattctctaacatcagccaatcgctactatctgtaccagggctttgtccgtatgaaccttggcattgacggtttattcaaaatcatacgctctcaaatgaaggagctgtcccccatttccggagatatatttttattctttggcaaaaaccggcagagtgtaaaaatactgcgttgggatggtgatggctttctcctgtactacaagcgtctggaaggtggaagttttgagttgccgacatttaacccccatacaggcaattatgagatctcttatcaggttttgtcttttatcttaaatggagtgtcattgaagtctgtacggttgcgaaaacgttttaggatttaatgtaatatactgtatattaactgtttgattttaaattaccatccgattattttggccgactcattgattttttgtatctttacgccatgaaaaaggatgaggtcatagagttattgaaggagcaaatcaaggagttgcgggatgataacaacagactcctggaccagatagatgatttgataaaggaggtttcttcccttaaagaggcactccttcaaaaaggcgaatctcttggcaagcaacagcgtcttaccaaggggatcgccaaacttgtatcaaacacatccgaacagcaacaaccccctcaacctgcattgccggaggaagagcggcagaagagagaagcagaaaaagcagataagcgtaaagccagaaagaacaatggggccaaacgtgacatgcattatgagatggagcaggaggaacatgacgtttatcccgacgatcctgattttgacatcaataaagcccggctggttaccaccgctcccagaatatgtgtccgctatgaatgtgtacccatgcgcttcatcaagcacgtctacaagatacacacctacgcgcaagacggttgtctctttgagggaaaaacaccggtctcggctttcttgaattccagctatgacggctcattcattgccgggctgatggaattgcgttatatacaatcgctaccggttgaaagaatcatcaactacttcgaaagtcatggctttacgctgaagaaacctacggctcataagttgatggaaaaagcctcaagcctctttgaaaatctttataagtgtatccggcagacagctttgagtgatccttataaggcagccgacgaaacctattacaaaatactcgtcccggaaaagaacagcaagggaaaaggagtccgcaagggatacctctgggtggttgtgggcataaacaccaggatgatatacctgctctatgatgacggctcccgctctgaaaaagttattcttaacgaattaggcggttgcaaaggtatcatacaaagcgacggatactcaccttaccggaaactcgaaagcgatgcttatccccatatcacacgcattccgtgcctgcaacatataaaacggaaatttatagattgcggtgaggatgacccggatgcaaaaagaatcgtggagatgataaacacactttatcaaaatgaacataagcataagatcggggttgacggatggacggtagaacagaatcttgtccatcggaaaaagtatgcgccggacatactcggagaaataaaagatgtgcttgatgatatagaagaacggggagatttgttgcctaagagcgaactgaaggaagctatcacctatcttcgcaatgagtggaatgccgtggtggacatctttaattatggtgacacttacctggacaacaatatagttgaacggatgaaccgctacatatccttatcaagaaaaaactcattgttcttcggcagccataagggagccgaacggggcgccatactctacacgatagcacttacttgtaggatgaataaagtgaatctgtttgagtatctcacggatgtcataaacagaactgccgaatggcaaccgaatacaccactggaaaaatacaggcaactgcttcccgacagatgggaaaaggctaatgactaaaaagggatcattagactttttacttttaatatactatatagaatcgcggagacgcttaccagagatgaagaatttatgaaggattgaaaaaaaatccttcataataagtggcagtaaatcaacttgctaagccataatgaagaatttgaaggaaaaaacggttaaaaacttatttccttccctaattccttccagtccaggatacccttatccagattatacaccttgaatcctttttttaccagaatgttggcggcattgcggctgcgtcttccacttttgcagtaaacggctacggggcggtctttttgaagaagctcctcgatgtttgtgccaaactcattgtccaatacattgatattgatgctgcccggtatatggccttcggaatattcggctaccgtgcgtacatcaaccagttggatggtcttgtcctgtatcatttcctcaaactggtcggaggatagattcttgaatttgtcactgtctttgccggtacatgcccataatcctagtgagaatgcgcagatgaagaatacaaaatagatggtctttatcataaaatggaatgttttgatgtttttgtttgctaaaaataaaagatacgactggtcataccttctttgtaagtacggatgttgaatacaatcttatcgcctttatgcagtttgccggcgtatgcccacaagggaacagacagatagactttacggttgaaaccttcgatgtcattattcctgtcatgatagagtgtcaagtataatgtttgttctccgtctttgttctccagtttgttctcaataaagtgataaccgtgtttctggtctttgactttgacttgtaaaatcaggttcaggtaattcccaccccgccagatgctttgaatggctaccgggtcggtctttatctccttgaatttagattcggacaaaggaacaggagaaataaccagttgggtattgtaaagcatggcttctttttctgcttcttccgagtctgtcaatggagcgtacatggtaaccgtgcggtacgtggtgtctggtgccagtccgtcaagaccggtacgtgactggatgcgccactctgtcccttcatccgttatcagataccgtccggttcctgtatggtcggttttcaagtcgatcatatctgtcagaacattaggatatacatagtcgtcttcaccgcacgcgccgagaagcaaagaggttagaaaagataaaataacgacttttctcatgtttattattttctttttcagggtggactgtaacatccaccctttacggtaaacgttcttatccttttgccgctttcaggtaattgatgagcggattggcatacatagtcagcaaagcatgacgcaggaaggcggtgtctttgttgggaagatcgactttggcaatctgctgttccagatatttttcaaagtgctctttttcttcttctgtgtactcggccgtgaaacggttgtctcccatcaagaggtcacacgccacataattgcctgcaaacaggcggtaactgctgtggatatgccggtctatggtttccgatatggcggtaaacaaatcacatttcggcaaattgagttctttcagttcgtccagttcatgattcagacaggcggaggtctggaaatggatgcgtcccttgtatccgtaaaggccggtctgcatattgatcaggtcgtcttcgggacttttctggaaatgttcgtcatcgcgtttttgctgcaactcttttgctttcaggaagtcacacgggtcgtattcgtaagaaatggctagcggaacgatgttcagttctttcagtctttcggtaacatcgccttcacctgccatggccatcattttcaatacactgtcctgggtacggtcattggaatctttggcacgtccctgacgttgcgctatccataaattctcatgtttttccttcatggcgaaatgcatgtagcgcgacatcaaggcagatgcttccagtttctgccgcatgttgaggccgcgtttcacgatgaatgatttattgacacgtaccagcttatgaatccatgggtagatgagcaggttgtcgccgatggcgatctctacggttgtcattccgttgtctatcagtaggatagatagaaaagccgagtccagaataatatcacgatgattagagatgaaagtgtagttccgggttaagtcggacaaggcggaacagtcgaatgtcagtccgttggctgtttttttcactaaatcccataatagtccgtaaaagaacgctttttggaattccaggtttgttttgcattgacgcatcttcatggcaagaccttcgaaaggtacgcccggcataacagactctaccactgtccggaaagcgggatcagcgattaattcttcatagatttgcggcaactcttcgggagtgtacggacgaatctcgttaaattcagctggtatgttcataatttataaaggttagtcagtgatatcactaaaatttattttctataatgtcagtcatcacatcttttatatccaatcctgctgcacgcacctgttggggaatgaagctggtagctgtcatgcccggagtggtattgatttcgagcaagtttactttttcgccttcggtaatgatatagtcaatgcggataaggccggagcaccccagaatgtcataaattgccgaagtgagcagacgtacacgctcggctgtatcttcgggcaggcgggcaggtgtgatttcctgtgactcgccgttgtatttggctccatagtcaaagaattcgttggcacttaccacctcggtgatggggaataccacttccttgtccgaggtcttgtaacagccgcaggtgatttccgttcctttcataaaggcttcaatcattacttcgtcactttcctcgaaagctttttcgatggcgggttgtatatcttccttagtctttactttggtgacaccgaagctggaaccgccggcgttgggcttgatgaaacaaggcagaccgattttgttgattacttcttcgtctgtaatttcaaatcctttacgcaggatcagtgattcggctacgcggataccgaagcctttcaggtattggttgcaggtgaatttattgaaagtcatggccgataccagtacgttacaactggagtaggggattcctaacaggtcgaagtaaccttgcaggataccgttttcccccggagttccgtggatggtgatgtaggcgaagtcgaattgtttcttttcgccgttctccatgaaactgaagtcattacggtctatcggggttttggagccgtccggaaggactacttcccaccgatgcccttccatctctactatatacaggttataacgctctttgtcaatgaaagagtaaagtccctgtgcactgcgcaaggaaacgacaagttcgctggaatctcctccggctactatggcaatagtacgtttcatagttcttctctgttactgatatagtttctccacttgtctatcaggtttgtcatatcctcgggcagcggagaggtgaagaacatctcttcgcctgtacggggatggacaaagcccagcgtcatggcgtgtaatgcctggcgggggcaggtctcgaaacagttgtttacgaattgtttgtatttactaaaatgagttccttttaaaatttcgtttccgccataacgctcatcgttgaacagcgtgtgtccgatgtgcttcatgtggacacgtatctggtgggtgcgtcccgtttcaagtacacactctaccagcgtgacatagcccagacgttccagtacccgatagtgggtgacggcgtgctttccttgggcggggtcactcagtacggccatttgcatgcggtctttggggtttcgccctatattcccttctatggttccttcgttattttctacgacaccccataccagagcattgtatttacgtttggtggtcttgttgtagaactgaagtcccaaatgagtcttggcatcgggggtcttggctaccacgagcaggcctgaggtatctttgtctatacggtggactaatcccacttgcggatcgttagggtcgtatttgggattgtctttcagatgccatgctatggcgttgaccagcgtgccgtggtagtttccgcatcccggatgcactaccagtccggccggtttgttgactaccatcaaatcgttgtcctcatagactatatccaatggaatatcttcgggaatgatatcattatcataacgtggacggtccatcatcaccgtcagcacgtcgcaaggctttactttataactgcttttcaccggtttgccgttcgccatgataagaccggcgtcggcagccttctgaatacggttgcgcgaagagttgacaagccgttcgaacaaatatttgtccacgcgcacctgtgactgtcctttgtctactactacacggaaatgttcatacagttcggcagggttgtccactaccggttccacatcatccagtgtgtcgtccagttcatccacatattcttctttcatcatcactgtgtgttaagtttaaaaccaggattcgtctaccaccggtttgtcatcgttcgcagttccggattcatttaccaatgcagaatcttcgggcatggtttcattgccgttgcctaccgtgagtgtcagtacggcttcgtgaggaaccttttctccggctttcaagtcgcgtcctcggtattttatgctgtatacccagtctttttcgccgctgatatattcgggttcggttattttaaaacctaatgcacgtaatttggcttcggcctggcggagagaactattatccatgacatcgggaatggctaccttgggggcgctgtctgcattgacggtcagatagacggttctgcccgacttcaccttggagccaccggcgggattctgttccagaatagcaccgggggctattccttttacatagctggagtctatgacgattgattttagtgactgcttgtcgagttcattttctgcgatccgcagattcattccttttacatcgggcactaccactgcttcgccgtggcgtgtatagctgtccagccattgaagggttccccaggctgctgccacaatgaccactaccatcgctatcagattgagccagaagaagcggttattcttgaatgaaaagaattctttgaatgttaccatatctaacttaattatttcgggtcaaagatacgacaatttcatttctgttcctacatttagttatgaatatcatatactttttgtacctttgcaccccgaaaaaacgacctgtttcctgtcagagtaaacaaaattgaggtaaaaagaagatgaacgagacaacaaatgaacaagaggtgctgctattgcgccgtaaactagaccttttattacgtaccggcaagctgctgatggagagtgcggcagacactaaccggattgaaagaaacatgaagcgcgtggccgcttatctgggcattccggaagagaaactgcatattgatatccggtggacgatgctgatggtcaatgtgagtgacgagaagcactctttttccaagtttcagaaatgcgagaaacatggcatcaatatggaagccatttcaaaaatcagtaaactttcgtggcgtgccattgagcaggattattcattggataaatacgaggaagaactggagaagattgctcgtcaggagcgtaattataccccctatgtcgtggcaatctgtaccgggtttgcctgtggagggttctgcaagctgtttggtggtgactggattgcttttctgattacggctatttgtacttttgtggggttccgtacccgtgcccgttgtattgagttcggtatcaatgtatatatgagtattgcgatctctgcatttttatgtacttgtctggcttatgcgttttctttttcaggtttatcttccactccgtatcatccgttgctggcctgtaccttatatatagttcccggtgtgccgctgataaattttgtggacgatatgattgacaatcacttgttggtaggtattacgcgtgcagccaacacggtaatgatggtaggaggcatggcgtttggtatcgcttttgccttgaggctgttggtgatgagtgatgtgactatcgaccagaagttcagtgaactgagcatggtgccgcacgatgcttattgggtatatgctgttgcggctgctattgcggctatgggattcgccactatatttaatgtgcagagacgtttgttgtgggtggtggctgtaggtggaataattgcagtatgtacccgtaactttgtaaactttgaattaggatatggtccggtgatcggttcgtttatgggaagctttgttgtgagtttgatagctgtcaaagccgttcattggtttcatgttcctaatcatgtgctgactattccttctgtcattccgatggttcccggtgtcttgatgtatcgttcgttgctggcgcttatcaatatgcgtggagtggtaggagaagtgacacttgctttttccaatggtattaactcggcgcttatcattttctgtatagccttgggggtagctgttcctaatatttttgcccggcgttacatagccaaggaccgccagcgttttcttacacagatgttggcggaacgcagagctcgtggtaaatttatagagtggtagctggtgtatgtaagcagtattcataaaaacttgatagacaaagaaaaaggattttccattgcggaaaatcctttttctttgtctatcaagtttactctgttaatttctgggtaaggcttcttttactaccattggacgcccggcatattctgcgccgttcaactgtttgatagcgtttgaagcttctgaagtttccggcatttcgacaaaggcgaaaccttttgatcttcttgtatcacggtcaatgattaacttgactgagcctactgttccatactcttccataacttctctcaaatctacttccttaacgttgtagctaaggtttccaacatacatattcataactgtcaatataaaaaattaataatctaacaacgaaatttcaagaagctctaaatcaggaatgaatatactcaatgtggataactgagaagatacatgatgagaataaaactagaataaatctctaattgtttgttggacaaagtaaactctttcatttggattatgcactatatttctgcttttattccatattatatatcatttattattataaatggtcggaaattaacacaatatggaatgaaaacagggttttatagggttattgagtgttgacaggcggtttctctctgtattgggtaggggaacaacctgtatgctgtttgaatacagtgctgaaatatctggcggtcgagaatcctgtcttatctgctatgtcattgacactgagttctgtatggagaataagccagatagctctctccatacgtattttggttatatagtcgttggctcccatatctgtcaatgctttcagcttattgtataaagaagctctgctgattcctattttgttgcaaatgaatggaatacccaactgttcgttatccagatgttctgtgattatctgattcaggcgatttaaaaattcttcatcggccgaactgaaggttccttcttcgggtggcggcagaggaccgatgtctgtatagcgggtacgcatcagttcccggttatgcagttggctacagacaattgcatacagcatacttacttcaaaaggttttgtgatgtaggcgtctgctccgtttttataaccatatagttggctttcttcgtcattacgtgcagtgagcaggataaccgggatatggcttatttccaaatcttcttttatttgtttacatagctcatagccgttcatatggggcatttggatatcgcttacaactatatgaggacgtttttcccggcaaagacgcaatgcttcctctccatcggctgctacccatattgtcttaaaccggtctttcagggctgttgccagataatcggtcaggtctttgttgtcatctactattaataaggtatggctttgggctgttttattttcttcctgttgttcgggaatgctttctgtttcttgcgtgggtgccaaaagtgtattcagatattcttgtgggtgcagcgtgatatttcccggttcggtatttaatggaagttcgaaccagaaagtagctcccggacttccgaaattcttgttgtcgtaggctccaatgttgcctccgtgttgttcgaccagtattttagaataggacaatccgattcctgtgccgggacgactgttgttgccttggtaaaagcggacaaagagattgttggtatccacatctttcagtcccggaccttggtcggaaatggatatgcgtactcttgtcctgtcttccgacaaacgggttgaaatgctgattgtactctcatcgggagtatatttcaatgcgttaattaataggttggtcaggatagtggtacatttttctttgtcgaagcacaaggtttgaatctccggctcaggttgatagacgagtgtgatgcctctgacggaggcttccggtttaaaatcggaaatcagttgctccgcccattcatccaattgtatgctctggatatggagtgtgctttgtcctacttccattttgcgaacattcagaacagtattcagaatgttcttcatccgttcagattgtttacagatgctttggatcaacggataattttcgttgtcggcggtaagtttgtccattagttgtttcaagggtgcatgtatcaaggtcagtggagtccggagctcatggctgatgttgatgagaaagcgcactttttcttcgtatacctgctgttcatgttctttcattgcccactttagcttggtttctttgttgcgcaatatcaggatgaaagtgaggatgacactgatgaagataaaaagggtgcaacttaggatgaaccagccggatttataccagggaggcagtactgtcagggtaagaatatcatagtctgctgtccagtcaccgttgcgggtactacaggcggcttttatgtgataactgcctgtaggcagactgcttaagtttatttccggtaaataagaatagatgttttgtccgttcagtcctgtaatggtgtatctatacatgggtttgcggaaaatatccttatcacgggtgatgattttgatgatgatcggtttgcttttttcattgacactaagttggtggtcgtttgatatccggtcgtagacacgttctccgcccactaggatgtcggccagttgaagagtggggagaagtgcgggttcgtcaggtaagtgccggttgatatgtagcaagccgtttacacctcccatatagacatctccggatgaagagagcaaccggggtttctccagatattcgttttgtaccactccgtccggttcaccgaataagatgaacttcttttctttaatcagatatgcgaataatttttcttccgttcctatccatacacgtccttgccggtcacaaatgagcgagcttatttcattaatcagggtattggggacaagggtatattgctttgtacccggattataataacttaaaccatggttactgcctatccatagcaatccgttctcgtcttgtgaaacagaattgaacacggtgtctgtttgacaggtaaatataagttccagttcgttgaggctggagttgatatgatagatatgttccaaatcgtgcagatagcaatcctctcctgtgctgtttatgggtaacaatgtaccgacaatatcagtgatgccttttcccttggtgatgggaatgaattgctttttaccaatatggtatttataaggtatttcggataacatcaaaatggtttcaggagtattttgatatacattgactgtttttccccgatggcataaaatatcattaatgctgtcgttgataatgacaagcggctgatatcggtgggtttctttatgaaagataaacaggccttggctgaatagcgaaaccagcagatggtctttgtccatgccggtgatggaagccaccttttcttcccaggtagaaagtatgtgatgaaactttccggtggccgggtcgaagaggttgatgccccctccgtctgttccgatccatatttgattgtcatggtcctgataaatggataggattgttttctcactcagtccgtaattctgtcccggcagtacgtcttgataggttttcattcctacctctttaatattgattaatccgttacgtacacttcctgcccacatattgtcgcttttgtcgttatatagacaaagaatagagttggcaggcaaggagtaacgatctcccggaatgtacctcaatgtcgatatcttgccggtctgcggattgagaatatggattcctcctccgtctgtacccatccatatttgtccgttatgctcttctaatgatagcactacattggttttgaggggagagttttgtgtatgataggtctgtaattgttttccattgcggtcataacagcttactccctgattgtaatgagctacccatacattcccttttttatcaatcaacagtgagataatctgttcactgttgaagggaacaggacgggtgttgcccgtagcgatatcaataaacagagcttttgcccatcggttggtggccaggagagtgcgggaatcccattggtaaagattggaaatatgatacttgccgttcggcttcaacgtatggaacaggttgataatatggtcttcatagttgtatttgtatagactgcctcttcccccgaagattactccgtcctcccataggcaaagagaactggctattaccggattgttgtctttatcccgcacaagggtaaacttgtcttctttttcattgtagcggaatactcccttttctgtgatggcccaaatggtatgttcttcatcttccaaaatatgtgtgacattaccgcgcagatatcttcgctgttcgtaaccgtcgaatcgtccgattcctgagcgtgtccctatccagacatatcctttttcctgactgacttccatacagcgtaccatggaggaaagtccgttttgagaggggatttgttggaaaaagtactgtttggcttctgatatagaatgcagtagagtgaatagaaggagcaaggacaggattcgtatgttgtgggcagatgttttcattgcttactcaaggtttgggaacaaaaatagttgattgtcttgaataacacaacaaaatgacgtatgaataatgcggacaaccgataaaaagtctctttttggctgattaattcctgtctgctccttcgtttccttttattttgctatagcatcgtaaacagcttttgccatcactttcgctccttcttcattgggatggatatggtcggggaataattccggcattccatccattgcgctgtgaaggtcaatgacaggcagcttgtttttcttggcaaccttcttaatcataggtataatctcttttgagatgatatcatcattaatgctttctccggtaagatatgcctttgaaggatagcatagatagatttcaggttgtgagggaagggctttaaaggcgtcaatcatggtttgtgtatcttttatgaaatctgctttatgtacccagttgaatgacttgctgtcattggttcccagtttgataacaacgatattggggttgaacgccaatgcttgttggtaagcttgttctttcatataagggcgatcacctttattcagcatggtacgtgcgctgactccaaagtttttcacccagtatttatctcctagcaaacggcctagaacggagggatagctgtcgtggctccggtttttgattcctgctccgtaagtaatgctgttgcctacacaggctacccggacagcatctttacggggagctttgaaactgcgcaaccaggcggataaatcgtttaacatctcattcttgtaaatgaagttttcgcggataccccagccatgtccgccactggcataaatatggagtacggctggtacatgattcttgtgcagccccaggtaataatttaccccattggcaggaggaactgtcttgtcatcgtcactgtaggcgataaaggcgcagggagtttctttggttacttgtttctcattggaaaattcggtttccagttcggcggaagcgtccttacctaaaagattatcgtgagatcctatgtgagtataggatttatccatggtgatgacaggatagaacaggatttgaaagttagggcggagttcggggcgggcatgtgtggcgatggttgaagctagatgccctccggcagaggagcccattatacctatatcatatggattcagattccatacatcggcactgtcgcgcgccattttcatggcagcttcggcgtccgagatggggagagtgcggtcaccatgaggcatccgatatttcagtacaatcagtgcgatgccttgtttgttgaagtaaggtgcccagtcatagccttcgtggttgacagccagtccgccatatccgccacccggacaggctactatggcacggcctgtcgccagttcgggagccggaaggaagacgcggagcgaaggggtgtcaatatcaaacggttggggagccttttgggcggccaagggaaaagatgctgataagaagaacagcaggatcgttaaaatagaaagttttagtttcataatatattgattaatggataaaaacatatttggagatacaaagatacttgtttttatatttgggttggttgtcattgtccttaaaaaaacaatggccgggtttccgactttgtttattactcctctaaaattgactatttctcggtgaaatggacctttttagctaattttggacttaaaaatagtgattattgtaccccttatacttctgttttcctctacatttgccacagattaaaataatgttaactatcataaattactaatttaaatttaattctatgaagaagaacctctttaacgtttttctagtgtgtgtcttctgtgtggcagcaattccagatatgtttgcccagcagataaaagtaacaggtaaagttactgacagtacgaacgaggggatgcccggtgtgaatgtacaagtgaaaggtacagccacgggaaccattacagattttgatggcaattattctattgatgttcctgactccaaatctacattagtgttttcttttattggctatgtgacccagcaagtgccggtcggtggaaaaaaagtattgaatgttcagttgaaagatgatacccagacattggatgaagtggtggtagtggcttatggtacggcaagaaagagtgatttgaccggtgctaccgccagcttgcgtccggatgctaacgatgcttctaaaacagcttcttttaataatctgttgcaaggtaaggtggcggggctgaatgtaacttcatctatggctgctccgggagctgccagttctgtgacaattcgtggcgctaactcattgcgtggagataaccagcctctgtatgttattgataatgtcccgcaatcttccaccggggaatttgcagagtcggctatgggtggcggtgatttccagattgcgcaggatcctttaagtgctttgaatcctgcggatattgaagatatcactgtattaaaagatgcctcggctacggcaatttatggttcccgcggtgcgaatggtgttattatcattacgactaaaaaagggaaagcaggtaaggctaaagtaaacgtgactgcaaactttaccattgcggatgcccgtaacctgcataatatgttgaatctggaacagtatgctgcttatgccaatatgaaggctaatgccggcgaggaaaagtactatccgcaagcaaatggcgagatgcattatgtgtatggtgaaaacttggataaatataaaaaagatcctaccaaccctgaatactatcgtgtcttgagttataagaactggcagaaagaagcctattcatctgctttctctcaagtctattctgcatcggtcagcggaggatcggatgcaatgacttattatgtttcgggtggttttaaggatataaaaggtattgtgagcaatacaggtattaaacaaggtgatttgcgtgcaaaccttacggctaacctttcaaagtccgttactatggcgcttgctttgaatggatctatcaaacaaaatgatatgatgaccgggggtaatacgacaggtggtattgccggttcattggcacgtacagtattggatacagctccttatgaaattccggcagacgacccgacattacaaacggacatggacgcaaaaactactgtttatagctggcgggatgactatgatgatataacggatgataaaagctttggcggtagtctggatttgaaatggaatatttgcaaatacctttcgtataatcttcgtgccggaggaaatgtgaatataaacgaacgtgctcgttggtatggcatgcagctcactatcggtgctaatgatcaaggtgtgctagccatggctaatttgaacaagaccaattataatatagagaacttattgaatttaaatattgacttggcgaaaggtattcatctgggagcgactgctggtgtaacttatgacggacatacattcttgaataagaatgtgaagggtactcgtttctctaattttgacttacgtacaaaagggttacaccttgcttctgtgaagactcatgaacaacctacccaaaaggattatcagttactgtcttatctaggtcgtatcaatctttctgcttatgataaatatttgcttactgcatctgtacgtgcggacggatcaagtaaattcaaaaagggtaaccgatggtcttacttcccttccttctctttggcctggcgtatggagcaggaagagtttatgaagaatattaactggttgaatcaaatgaaaatacgtttaggttttggtgttacaggcaatcagggcattaatccttatgctactttctctgattattcacaaataatagattatgcaaaagccacaggggatcagattttggcaatggcggtaagcaatttgcagaatgacggattgaagtgggaacgtacatcttcttggaatgtaggttttgattttgcttttttcaacagccgtctgtcaggatcagtagatgtatatcagaaaaaaaccaatgatttgcttatttcgcgttcattgcctgcttccagtggttttgcaagtgtgatgttgaatcaaggttcgttgaaaaacaaaggtgttgaaattagtttgaatggagatattctccgtaacttgaacggttggagttggagtttgggcggaaacattggtttcaataaatcaaaaattggtgacctgggttttgcaccgacagattttggaaccttgaagaatgtgcgtggatatcagggaacttctataggagatcattttggtattgctaatcttttcattgcaggtgaggcaccgggattgttcttcggatataagactcaaggtattattcagccggaagatattgtagatggaaaagttgcttatacggctgctgacggatcaacaaaatattattccagttctgtggccaatgacttgggagccggtaatataaaagcggtggatatgaatgaggatggtgttgtggatgaaaaggataaaaccattttaggcaatccgaatccggactttacttatggtttccaaactcgtattgcctggaaagacctgtctgtttcggcttcttttaatggtgtgcatggtaatcagatattgaatacgaatatccgttattatacgccctctcggcaagctggtaatttgacacaagaagcattccggaatatctggacggaagagaatcattcaaatctttatccgtcggctacggcgaatgtaaagaacgtggtttatgaccgttatattgaggatggaagttacttgcgttgttcggatatcactttgaattatacattgccaaaatcttggatgaagaaaatcggctttcagaatataggtgtatttgcttcggttaaaaatgcatttgtcatcactaattacagtggatacgatccggaaatcaattcgtttgcttttgatggattacgcccgggcattgatatgaatgcatttccaagccaacgttcttatgtctttggattaaatgtgaccttttaaatagtttaaccgataattttttttgtaaaatgaaaaaactaaaatatatatttttattagcaggtgctttgtcattggcatcctgcgaatcgtggctggatgaagacccgcaatatacgataaatacaaaaactcagtttagtactgtggaaaatgccagacaggctttgatgggatgttacggatatatgtcggctgataatgcttatggccaggcatggcaggaagtaacatttggatattgtggttttggatggtcacaaacgaatggcagttctacagatttattggtctctatggacggaggaattgatgaaaccataaacacaatggcgtggagagggatgtataaagtgattggtgaaacaaatgcattcattgccaatattgccgatagtccgttagaatcggctgataaattgccaatggaagcggctgctcgttttttgcgtgcattggcttattataatttggcagttacctatggagatgtacctttaaagaccactccctctgctcatgacggagtagctgttcctcgttctcctaaaaatgaggtctttgaattggtacgtactgactgggagttcgcttatgagaatttaccggaaaaagatgatgacggttttgcaacgaagtgggcggcgaaagcgtatctaggaaaactctatcatactttgggctgtcagggtgataatacggcttgggagaaggcgaaagcgtgttttgatgaggtaatgcctaaataccggctggcggataaattcagtgatttgtttgttgattacgtacaaggttctccggaatctatttttcaattgaattttgcacttgcaggttctaccacccgtaaccggggtagctggctggtcgctcctaatggctcttgtaatgggcaggcttgggaccgcatacgtgcttcaaaagctttgtatgattatttttgggctacttatcccggtgatccacgtattgaaagcacattcctgacttattggaagtcttatgccggagtaggaaaaggtgagaaacctaaagaggagcctatagcttcggcgcgcgatactgtatatgcctatccttattttacatataccattgaaggagaagaaaaacctgccggatggaagaaacccaagttgtatgtaggacggattccttacgagaaattagctgatccggctagtccgaaagctgaagaactttatgctatgattgccgatacggctactgcgactcccgctgaaaaagggtatttgaaaggcttgttgtctttgttggaaaatgcgacaaaaaagccatctaccaatacaaagtcatggccctatttcaagaaaccgtgggatcctgagcagagtggtaataacagtcataagaatttaattttgtatcgttatgcagatatgttgctgatggcagcggatgtatataatgaattggggcagactgacaaggcgataacattggccaatgaggtgctgaagagagcgcgtcaatcaggaaacgcgtctcagccggctgactggaagagtggcttgtctaaggaacaagtgcgtgagaaaatttattttgaacgtattttcgaaggtgccggtgaaccggaaatgtatcagaaaatgcgtttacgtggcacagagcttttgaaaaaagctttcgaggtcaacaatgggcatggaattattcaagaatcagtggccaataatcctaaagggaacgggaactggggagaacgtatttttaatgatggaaatttgaatgatgaaaacttcctgaagaaaaatttattgctcccggttccgaaagatgagatagataccaattctgctcttgattatagtgataataattatggctatactaattaagaaaacatgatagaacgctttattcaataggtctttattggatttttccggatgcagggcgcacctgcgctttgcatccgtttttcttgtctgtaacctgtttctggacattctcggatataaaatagtcatttccagacaagaaacaataacataacttgtatctttgcggatgttaattctttgcttatttaaatttatgaatatgaacaacctacaatcaggattacttttttctttgaccggcattactgctgtggcatctttgtcatcatgcgcttcacaaaagaaaactgaggagcagaaaccttacaacatcgtgtatataatgaccgatgaccatactgcccagatgatgagctgctatgacaagcgttatatggaaacgcctaaccttgaccgcattgctaatgacggagtgcgttttactaacagttttgtggccaattcattaagtggtcccagccgtgcctgcatgattaccggcaagcatagttgtgctaataaattctatgataataccacttgtatatttgatggttcgcaacagacttttccgaagctgctgcaacaggccggataccagaccgcccttattggaaaatggcacttagagagtctgcccacaggtttcaattattgggagattgtacccggacaaggtgattactataatccggattttattacgcaagacaatgacaccattcaaaaacatgggtatataaccaatatcattactgatgatgccatagactggatggagaacaaacgggataaagacaaacctttttgtattttgattcatcacaaggctattcatcgcaactggctggcagatacttgtaacttgtctttgtatgaagataaaacttttccgttgcccgataatttctttgatgattatgaaggacgtcctgcggcagcggctcaggaaatgagcatcgtgaaggatatggatatgatttatgaccttaagatgcttcgccccgataaacaaacccgtttgaaggctctttatgaaaattatatcggacgtatggatgaggggcagcgtgcggcatgggataagttttatggtcccattatcgatgatttctataaaaagaatcctcaaggtaaagaattggccgattggaagttccagcgctatatgcgtgactatatgaaaacagtgaaatcgttggatgataatgtaggtcgtgtactggattatctgaaagaaaagaatatgctggacaataccttggtggtttatacttcagaccaaggcttctatatgggagaacatggttggtttgacaaacgctttatgtacgaagaatccatgcatactccgcttataatgcggttgcccaaaggttttgacaggaaaggtgatattacagaactggtgcaaaacatagattatgcacctacctttctggaattggcaggtgctcctgttcccgaagatatccaaggtgtttcgttgcttccactgttgaaaggagaaaaacctgctgattggcgcaaatcattgtattatcatttttatgaatatccggcagaacatatggtgaaacgtcattatggtgtacgtacagagcgttataaattaattcatttttataacgatattgatgtgtgggaattgtatgatttacaggcagaccctacggaaatgcataatctttatggtcagaaagaatatgaaccggttgtgacggagctgaagactgaattggcaagattgcaggagcagtataaggatccggtacgcttttcacccgatagagacaaagaataagaaaaatagcatatatcatgaaatacacctgtttgattttgctatggtcgttatttgcgactatggccttacctgctgacaacctaatccaatctatatctattgttccctgcccggagagtattactccgggtacaggttattttactttctccggaaaaacagactttacggtagaaaatgaggagcaggcagaggttgcacgctgtttctctgctctttttacccaggcggccggatttactcctagtgtgaaggttggagaaaagaaggggaaaatcagtttcctcaccgatgacgcattaaagagtgaggcgtatcatctggaaataactcccaggcagataatagttaaagcttcagatacaaaaggtttcttttatgccttgcagactattcgtcagttattgcctgcttccattgagggcacagcggtggcggaaactgcggattggagcgtgccggctatgacaatcaaggatgaacctcgtttcggatatcgtggattgatggtggatgtggcccgcttttttattccgaaagagaatctgcttcgtattatcgattgtatgggaatgttgaaaatcaatactctgcatctgcatttggtggatgataatggttggcgtattgaaataaagagatatcctttacttacggaaatcggttcacggcgtgtagatcgtcctggaaaatcttttccggagcgtcgtaatccccggcagggtgaaccgactgtagaaaaaggattttacacacaggaggatatccgtgagatagtggcgtatgccgcccgacatcaggttgaagtgattcctgaaattgaaatgccggctcatagtaatgctgcgttggcttcttatccgttgttggcttgtcctgtggtcgataaatttatcggtgtccttccaggattgggaggaaatcatgcggatgtgatcttctgtgcaggaaacgatagtgtgttcactttcttgcaaggggtgattgacgaggtggtggagctgtttccctccaggtatattcatttgggtggggatgaggctcggaaaacgcattggaaggagtgtccgctttgtcaggagcgtatgcgacaggaaggcttggaggacgaagaagcgttgcaaggttattttatggcgagaatgagtaaatatgtacaaagcaaagggaaagaagccatgggctgggatgaactgaccaatacccggattcccgacggagcaattatttatggttggagaggctatggtcaggctgccgtcaaggcagcggagcaagggcataggtttgtcatgactcctgcacgtatcatgtatttgattcgttatcagggaccgcaatggtttgaacctttgacctattttgggaataatacattgaaggatgtatataggtatgaaccgatacagaaagaatggagtccggaggtacgttccttgctgatgggagtacaggcttctatgtggactgagttttgcaataaaccggaagatgtggaatatcagctgttccctcgtctggctgctttagccgaagtggcttggacacagccttggcataaaaattggagaagttttttggtagcaatggataaattcaacgagcatctgtctgctaaaggaattgtgtttgcctgttccatgtataatatacaacatacggtaacccctgtaaatggaaagctacaggtgaaactggaatgtgaacgtcctgatgtggaaatccgttacacaatggatggtaaggagccgacagaccggtctccgctatataagaacccgttgatggtgaccggtacacaaactataaagtgtacgacttatagagcaggtcggcagatgggaaaaacattgacattgcctttggtttggaataaggctaccgccaaacctgttttaggaaatacacaggctgggaagattttagtaaatggtatacgtggcagcttgcgccagtcggatttcgaatggcattcatgggaaagcagtgattctgtcgcttttactatagatttgcaaaagaaggagtcgcttcgttctgtatcagtgggatgcataacgaattatggcatggcagcccataaaccggcagatattgaagtgtgggtttcaaatgataatcgggattatcgtaaagtatccggtaaacagttcacggatggagagattttccgtgaagggactttcaaagaggatgtggtacttgatttgaataaggaaattggccgttatgtgcggattattgctaaaggagccggagagtgtcctgcaacccatgtacgccccggacaagaggcaaggatttattttgatgaggtaatgatagaataaatagatatatgagaaatacattattatattttttggctgctctggttatatttccagtaatggcgcaacaacaacccgaatggcagagccaatatgctgtcggactgaacaaactggcccctcatacttatgtgtggccttatcaaaccgtatctgatatccgtaacggagattatgaatcttctccttattacatgagtctgaacggtagttggaaattccattgggtaaagaatcccgataaccgtccgaaggatttttataaaccggagttttatacaggaggatgggcggatattcaggttcccggcaattgggaacgtcaaggatatggaacagctatttatgtaaacgaaacctatgagttcgatgacaaactgttccattttaaaaagaatccgcctttagttccatataaagagaatgaagtcggttcctacagacgtacctttacaattcctgccgattgggaagaccgccgtgtggttatctgttgtgaaggagtgatttctttttactatatttgggtgaacggacatctgttgggctataatcaaggttcaaagacaccggccgaatgggatatcactgataaattgaagaaaggtgagaatacggtggcattggaggtttaccgttggagtgccggatcgtatttggagtgccaggatatgtggcggttgagtggtattgaacgtgatgtgtatctttacagcactcctaaacagtatatagccgattacaaagtaacctcttctttagacaaacaacaatataaagaaggtattttcggtttggaagctaccattgaaggaccttctacttccatgactacctttgcttaccgactggaagataaaaccggtaaggcggttctgcaaggtgaatatcctatcaaatcgaagggattgagccatttcttgaagttggatgaacaaagtttgccggatgtggaagtctggagtgctgagcatccgaatctttatacgctgatcctggaattgaaagatgtaacaggtaaagtaacggaacttaccggatgtgaagtaggtttccgcacttcggaaattaaggacggacgtttttgcatcaatggtgtgccggtcttggtaaagggaacgaaccgtcatgaacattcccaattaggacggactgtaagcaaggaactgatggaaaaagatatcaaattgatgaaacagcataatatcaatacggtccgcaattcgcactatcctacccatccttattggtatcagctttgtgatcgttatggactttatatgatagatgaagctaatattgaatcacatggcatggggtatggacctgcttcattggccaaagattccacttggttgcctgcccacatggatcgtacccaacgtatgtatgagcgttccaagaatcatccggctatcgtcatctggtcattggggaatgaagccggaaacggtattaacttcgaacgtacatatgactggatgaagtcagtggagaaaagtcgtcctgtacaatatgaacgggccgaacagaattataataccgatatctattgccgtatgtatcgcagcgtggaagaactcatggcctatgcccgccagacagaacctaaagtctatcgtcctttcatcatgacagagtatctgcatactatgggtaatagtggcggaggattaaaggaatatatgcatgtattcgaaaccgaaccgattgttcagggaggttgtatctgggattgggtggatcaatctttccgcgagatagataaggatggtaaatggtattggagttatggtggggattatggtccgaaggatgtgcccagctttggcaatttctgttgtaacgggttggtcaatgcagcccgcgaaccgcatccgcatctcattgaagtgaagaaggagtatcaatatatcaaatcggcactgaccgatcctaagaagctgacagtggaagtcaagaactggtatgactttaccaatttgaatgcctatacgttgcactggcaggtcatgggggatgatgggaaagtgatagcagaaggaactcgaaaagcagactgtgcccctcatgaggctgtaacattctctttgggtgctgtaaagttgccttctacgattcgtgaggcttatttgaatctgtcttggacgcctgataaggcaactccctttattggaactcatgacgaagtggcctatgaccagtttgtactgtctgccaacaaagggtatcgtgcgccggaaatcaaattggctgataaggtgaagatagatattgatcctgcaaccggcgctttacgctcttatatatataaaggtaaagagatgctttcatctcctgtagttctcagcctttatcgtcctgttacggacaatgacagcagggaaaaaacaggaggagccaaagtttggaggaaagaaggtttggataatatgattcaaaaagctacttttgtcaaagcatctgaaacaggtggtaaagcggaagtagaattatggaatgctaaaggcgtaaagttgggaatggctacctttgtatatactttgcagagcaatggtgcattaaaagtaaagacaactttcctgccggatacttctgctgttacttcattggctagagtgggcctggcatttgaaatgccgtatgcctataacaaggtttcttatttgggacgtggtgaacatgaaacttatatagaccgtaatcagtctggatgtattggaatttaccatacagatgcagaacgtatgttccattattatgtgaagccccaggctacaggaaaccgtacggatgtgcgttggatggaattggcggatgaggcaggagaaggtttgtctttccgttcggataaagtgttccagttcagtgttattccatttacggattctaatgtagataaagctactcatattaataaacttgagagaacagggattataaatgttcacttagatgcggaacagtcgggggtaggtactgcgacttgtggtccgggggtattgccgccatatcgtgttccggtggagaagcatacgtttgagtttatgattcgtccattaaaataacctagtaataaagaaaaatgagaaaaacgattctaaccgcagccttactttgtgcttttctgggaactcaggcacaggagtattatgagaaacacgtagcttttccggcaggagcgactacggaacagaagatagatatggcttcccgtttggtgcctacaccgcaacagttggcatggcaacaaatggaattcacttgtttccttcattttggtattaatacctttacaggccgtgaatggggagatggtaaagaagatccggccattttcaatcctaccgaattggattgtgaacaatgggtaagagctctgaaggaaggtggcttcaaaatggctatcattactgccaagcatcatgatggtttctgtttgtggcctacccggacaaccaagcattctgttgcttcttctccatggaaaaacggaaaaggggatgtggtacaggaactccgcaaagcttgtgacaagtatggattgaaattcggagtctatctttctccttgggatcgtaatgcggaatgttacggacaaggagaagcttataataagtttttcatcgaacagctgactgaactgcttaccaattacggagaagtgcacgaggtatggtttgatggagctaacggcgaaggacctaacggaaagaagcaggaatatgattgggacgctattttgaagactatccgtcgtcttcaacctaaggcagttaccgctatcatgggcgatgatgtgcgttgggtaggtaatgaaggtggattgggacgtaccacggaatggagtgcaacggctttgatgcctaattcttatccgggttctgatgaggtctataagagattgggcataaatgctatgtccaaggatttgggaagccgtgaattggtatctaaagcatcggatttgttttggtatccttctgaagttgatgtttctatccgtccgggatggttctatcatgccgaacaggataatcaagttcgttcacttgccaacttggtgaatatttattatcgttctgtgggttgtaactctgttttgttgctgaatattccacccgataaacgtggtttgatgcacgagaatgatgtgaaacgtatcaaggagttgacggaatatataaaaaagacctttgctgataataaagttgagaagggaaataggatatggacagccaaagtaggagatacgaaagaatataaggtgaggaagaatacacttgttaatactttcttaattcaggaggatattacaaaaggccagcgtgtggaaggttttacagtagaagtgttcgccaatggcgcatggcatcatgtgggtgagggaactacggtgggatataaacggttgttgcctttctcggatagtcatgccgaaaaggttagagtgacaattacgggtgctcgtggaaccgtcaatatcagtaacataggcttgtattatgctgaaccattggttgataaaacgatgaaagtaaccttgagtgatgtcccggtggatggttggaaaacagtgggcatggatgcagccgcagccatcgatggaaaacaggaaactgtttggaaaaccgaaactttaactcccttggtggttgatatgggtaaagaagtggaaatagccggtttcagttatgctcctgcacaggaggaggatctgactggcactatctataaatacaacttttatgtcagccgggatggtaaggattggatgaagtgtgacgctacaggtgaattcagtaatatcatgcataatcctgttccttattttgtacgtttcggaaagacttatccggcccgttattttaaactggagcctgttaccgaaataaataacaaagcagtaactgctgtcggtgagataggagtattgttgaaataaatcaggttaatatatttttttattttaggagaagttatgtcaaaagtcgggtgagagaatcatctgggttttgacgtaacttcttttgtatatggaaggcatattaaggaattagctaataatctgttaagagctttccggattttgagaaaacgtattatatttgcataagcataacagatattcaactttttgattaattgtagaaagcctttgtttaatcgatatcacttaaatgagtaaaatatgaaaaaaagcttgtactttctttttatattagccttgttctgtttgacaggctgcaaggatgcgcttgttccgaaacctataaagctcacttgcaatatcaatacatttgacgctcctatatcatgtatcagccgttcgacagcagatgcggataaactttatattggtcaggaagacggttgtatcatagaaaaagtgaacaataattgccagacctattccattaatagcaaccggcgtatatatgatatattggaatatagtgaagattctctgtttgtgggaacaagagatgccggtttgaaactattggctaaatcctctcggcagacccagacttactacataaaaaataagaggatgaattattcggtatatagtatggctttggatgatgacaaacagtgtttgtatgtggggactagtaatggactgtttagattgaatttgaaagatggttccacatctcatgaactcactcccattcaactagggaaatgtagtaaaaactgtggggtgaataaggttgtgataaaggaaaaaaaactatatgtggctagtgaacaggggttgtttgttgtccgtaatcttgaaaaggactttaaacgacctgttatagattctctggttaccaatgtcagtgtttataatgatacagtatatgctttgttggaaaattcggtttttaagatatctcccgatggaaaaaagacgcttgtacgcaaaggacggtgttacttgtatgctcaaggacccgacaaggatgaatggtttatcagtgctaattctatactttatgtcaaagacggttgcactttagaatatgatttgccgaatggtatcagtactatcgctaggcagataggctttatggggaaagattttctgcatctggcatgcagagaggctatgctttcttttgccttgcgacagaactcggcagatttagacaataatgtattggcagttagtgataaaaggacgggagactccattttctttattaccgatgatcttcgtttacatctgtataagtttgtctataatcatccggaattcaaatcaaagtctttaggaaagattgaaggcttggatattgtgggtaatgatattataaaatttttgggaaccagtcctaatactttctttcttgctacgcgtaagaaactttataagattaaaggcaatagagcggagtgtcttttgcagttcagtaacacgaaagggcagaataatatcacttctctttattattccaccgcggaacattgtctttatgtgggtactagggaatatttaggtattatagatgaacagcaggaccatattgtaactcctattccggttgtgtcagataaaggggtgaaagatactatcgacgcttatattaccggaatttgtgagaatgaggatagtatttatgtaacgaccttgaacaaaggattgtatggaagacctttaaacagaccgcaggaatctttctggcagatacgtgatttatcagagtatgagagtgtttatggtgtgataatgaatggtagaaataaatacttgaatacctcgttgggaatcgttaatgaagaaaatgcgaccttgttgccagtgaaacatgtgaaatcaatatcgggagctcttgaaaagaatcctaatgagggctttttcatactctattattatggtatgagttttaagggattggatgatgccggtgtcccagaaccattattctgcgatttggcttttagcaagccttgtattgccgtcaatggacggaaagcggttttgggatgtaagtcaggattattcctttttgatggtaaatcaggcttgcttcctatctcgatagaaaaagaagagatgtcctatgcgctgtatatcatcctgtcaatagcggtgctgctatcggcttttcttgctcttttccttttgaaaagacggaaaaaaggaactcggaaagcgctgatggataaaaaagggataaatccggatgatgtcgggatgaattgggaggaactggaaatggacgttcataaggttgacaaaaaagtcaagaccctgtttgatgccttgggatacagaaaaacagagggagaggatgatatgcgtcaggaactgaaacaggtgtgtttggattttgctgacaaatatcctgaattgggtaaattatcctttatgaaacgaaggggaaaagaaaggtattttataacgatacttctgatgatagaagatattgatgctgctattatttcaagagtgctggatgtggatcaggcaacggtaacaagacataagtataatgtaaggaaagaaatagaacaactttatcctgatggggagtttgattgtaaagtcatcaatctgctttatgaccgtatcaattcaagaagaaaataagtccatctttagagttatctcaatttactgtatttcgtagagccggcttcgtgtatctgttttgttatgaggaatggcttttttgccggaagtgctgaaacacttccggctctccttttttcctccttttctcttctaggatgttttggtcatataaaaggaggaaacgggattaaaaaggtattttcgggataatttcaaacactacttttgtttccgtcagatgcggacactctgattgtttgtcgtacgttccgtagatgattaaaatgtttttcgaaaaaccaattgaattttattaattaaccgtttaaactaaacttttatcatgaaaacaaagtttgtcttacttctagtgttttgtgccatttcattaaacatctttgcacaagagaaaaaaataaaggatagaagaaccaatcccgaactttattatttggaagaatcggaggttgccaatagtctggagttactgcctcctcctcctgaagcaggaagtattttgttcttgtatgacaaagcccgttacgactgggggaaattgcaaagggatactcctaggggtgaacaagctgtcagtgatgcccgtgtaaatggtgatggcgttccctttgccttttcggaggcttttggtattgaaataacgagggataaaacgccggaactgtataggctcattattaatatgagagaggatgccggagatttggctacccgtcatgctaaagagtattatatgcgtgtacgtccttttagttttttcaatgaaatgacttgtaatcccgaacagcaggaagaactttcaacgaacggttcctatccttcgggacatacagccataggatgggctactgcccttgttttggcagaaatcaatcctgacaggcagaatgagattctgaaaagaggatttgaaatgggacagagtcgtgttatttgtgggtatcatttccaaagtgatgtagatgctgcccgaattgtggctagtgctgttgttgcccgtctccatgccaacgatgcttttgtgaaacagcttaataaggcgaaagatgagttctccaagctgcaaaaagcaggactcattcagtctgtttccaaaaaataattccctataacttaaccataaaccgtaactatttaatgtaatgtttttcttagatgaaccggacaagagtatttgctgagcctaaaagcatgactattgaccggatgctgatgggaggaggagtctgactgattgctttcattgtgtggtcttacagattcttcactgccctcagtatgataaaaatcagagacagactgacaggatacttggatggttaccattaaaactgtatattatgaaaaatcttatatcattaggagtttttctcctgatattgctctccgtacaggtaaatgcacaggaacaatcagttttgaaaatacgtcctacaggacgaatcttgatggatggaggcttgtttcattcagataataaaaactttgtagatggtgtagcgattcctgatgcccggataggtgtaaaagcaacctatggaaaatataaagcgaaagtggatataggctatgcgtatggaaaggtcagtttaaaagacatatttgtagaaagacaattttcctcacatgcgttattacgtgtagggaattttgtacatcagttcgggcttcaaagttctactagttcgtctatgaaagtaaccatggaggagccggcaagtaatgaggcttttttcaacagccggctgataggggctatgtttgtgtatgacaaaaatgattttttcggtacagctagtgttcatgtggagagcgaggctcttaagaagaaatccaatgaattgggtaaaatgggttatggtgctatgagccgcttggtctatcgtcctttacatgacacagggagattgtttcagttgggtatttccggtgcttacgaaacacctagatacaatagcgaacctacacttaaccatactagctttgacttgggggctaatttcccgacgcgtattgcaaaagtcagagctgtgaatgccttgattccggatgcaaagaacttgataaaatttacaccggagatgatagcaggatatggtcctgtggcattggaagcacaatattattatcttcaagtgaaccggaaaaaggattttaagaattataaagcgtgtagatactaattgaaaagtgcgctgtattctaattgaaaagagctccatccataacttgttacaaaattactataagtttaaaatattcatttatcttgtctcattttttgtgtttccttaagcctataagacagtccggtcatattaaccagataagctttatgtgtaagcctgtcaaccattgccgccacaagcaccttgtcctttatgatttcattccatctgttaaaagccaaattagtagtaatgattgtagccttttttccggctcttaacgacaggtggttaaaaagcagttctcctccttccttgtcacaactgacatatccgaactcatcacagatgaccagatcgtatttttcaaaccttaattgtagcgtcctcagtgtctttgctgatttagcctcccttatctgggtaagcaggaccggcactgaagtaaacaatacggtaaagtcctgttggcaggcctttattcctaaagccgtagcaatatgcgtctttcccgttcccggatttccatacaggaccaggtttcttccctgtctgatgaagtccagtgtctccaattcaggtaatattacctgtgcctctttgggcatgtcttccataacaagctcatgcagatacttcatttgtggaaatcccgcagatcttatccttgatcttcttctacactcccttctcctggcgctttcctttccaagcaattccgtcaagaactgcagatggttccagttttcttcagctgccaatgaaagggtgcattccagttcctctttaaaggccagaagcttcagttctgcagcatagtcataaatggtttctttttctgatttcatatattataaacttaaatggttggtattatatcatgcacttcattgtatcctgtcatgagcgccgtgatgccttcaagcatatccacagcttctctttctatattctcctgttgtgccgggagaacaggcggttccatggtttcttctgtctctccctgtacgctaccatgcagcatggcctttacctggtccggagatatctttctgacaccacgtccggtcagctccttgcatgccgtgacaatgtccgttccggaaaatccattttttcgggcatagtccagcaacagaacaaacgtcctgttgtcctccttgaaatggatgtcatacagccttctcagttcttccggtgctctttgccaaaccacagagtggggcaatgcccccggtttacgggaaagtgtacgcaaatagtgctccagcttgatgcaccagtctccaccgcaataactgcgttgatgagaggccactttctccttcccgtgcaggatgacgattttttcactataaaccttgacatgtactttttctcccacaagagaatcaggtacggaataatgaacatttttcatgctgatagttgaccatttatccacaatgtactcatagacctcaaaacagcccagattaccgggaaaaggcttcagcgatgacaggtcagcttccagacgtgatgttttctccgctgttgaaagactgccttgctcgttgttgacctgcatacatacccggtttaaatgctcctgggcagaatgtatatcaccaaaatggtctgtcaggcagaaagctttccttctgacatattccacgctgcgctccacatgtcctttctcccatccggcccgtacattacagaaacggtactcaaaacaatagaaaccggacatcttcatcaaagcttctgtaggtttcttatcaccaccgacaaagctcttgacggctacacgcatattgtcatagaccatcatggcggggacaccatgtatatccctgaaaaagttacggtgggattccatgaaggcaagcgtattctgatgcctgaaaagataggcgtatctgccattgctatgcccgaaagtgaatacggccagataaaacttggttttgacgccgtcaataaaaagaagaacttcaccccagtcaaactcggcaatgcatccaggctcatagaacaaccggataaaggcttcgctctttttcttctctttgtatgactctatattttttatataactgcatactgtggcgtaactgatggtgtatccttgagataacagaaactggtggatatcctttttcaacatgcgctgtttgcgaagtccggtagctatcttaacggcattcttcttcaggcaaaatcctatcttatccttaatctcttgtgtgagccggcgaggacggcgtctggaactgtcatacctgggctggatggtaagcaaatcactcaaagcctcttctggattgtccgtgcggatggctgattcgtactttgaaagaatattgtcaacggtatgacggctgacatgaagttcacgagagatacgccgtttgctataaccgcatactctatacatgtgtattattgattgtctttctaccatagtcttcattttacctttgcatttggattatacaaaggtcattatacttatcctatggtggcgcaattttcaactggaatattggcgcacttttcaattagtatctacattataaagcgagtggtatgtatggaatactgagaggtttgctgataggtggtaattatagatattcacatacggattgtggtattgccactccggactctggttcgttggaatgtgtattcggatataactatactgatatgtcggatacccggtcccatatttatggcgggcgtttgaacgatgtctcttttactgtcaattattatatcaataagtatatgatatggagattccggtactcttatactaagataacggatagagtgggatttgaaaaccagtcattaagtgcgtttcagacacgttttcaagtgatattttaaatagagggtcagagtttcattttgtttcaagagtttgaagcaaggtggaactcttatatttgaaacagattgggtggcaagaagaatgtccttttgggagtagagggtagcataaacctgttactgtaagaacgaatatcgaaaaatagctttatctttgtattctttatactaggaattaaatgaaaaacaaatgaaagaagcaaccataactccttttgcaaagccgctatatataatgaccaaacctgtaggtgcggtttgtaatctggcctgtgattattgttactatttggaaaaatccaagttatatgaggaacagccgcgtcatgtgatgagcgatgaattactggagaaatttattaaagaatatattcagtcgcaaaccatgccgcaagttttgtttacctggcatgggggagaaactttgatgcgtcctttagttttttataagaaagccttggaacttcagaaaaaatatgcaggtggtagaaccattgataattgcattcagacaaatggcacattgctgacagatgaatggtgtgaattcttccgcgagaataattttttggtaggcatttctatagacggtcctcaggaatttcacgatgaataccggaagaacaagatgggacaaccttctttctataaggtaatgaaagggattaacctgttgaaaaagcatggagtggaatggaatgccatggcagtggtcaatgactataatgcagattatccgttggacttctatcgtttctttcgtgacgaacttgattgtcattatatacagtttactcccattgtcgagcgactgtctagccgtgcagatggtcttcggctttcttcattaaagcaaaaagacggtgaactggctcctttttccattactcccgagcagtgggggaatttcctttgtactattttcgacgaatgggtactgaatgacgtgggcaattactatattcagttgtttgattctacgctggccaattgggtgggacagcagccaggcgtttgttcattagctaaatattgtggacatgcagccgtgatggaattcaacggtgatgtgtatgcttgcgatcattttgtctttcctgagtataaattgggaaatatttatcagaagactttggtggagatgatgtatggtaaagaacaggaaacttttggtgtgatgaagcacaatagtctgccacagcagtgcctgaactgttcttatgagtttgcctgtcatggggaatgtccgaagaatcgttttatgttaagtaaagacggtgaaccgggattgaattacttgtgtaagggatattatcaattttttgaccacgtagcaccctatatggattttatgaagaaggaatatctggcggaacgcgctccagctaatgtgatggagtgggcgagagaaaggagaaataaatagactgttttcagtaagccgactatatggaacaagcaagtcaacttacctggtcgtttcagttgacttatttgatcatttaagttaagttactttttcatggctgttcggcttagttggaaaaataaaaggagcaaagtctctacgacttcactccttttattttttccggtcagatgaattattttccgttgtattcatcagatacagttaatttcttacgaccttttgcacgacggctggctaatacgcgacgaccgttagcagttgccattctttcacggaatccatgtttgttttttctctttctgttagagggttggaacgttcttttcattgtatatacttattttatgttattattcaccatgagtaacgggctgcaaaattagtgacttttttgaaataaacaaagagataactcatttttagtgatttctttttgcgttttttcttgatttacattacttttgcactcgaaatcacagctataagtgaatataatctgaaataataatcaaatataagcgaagaaaagtatgattaatgctcaagacattaaaatcggaacagctatccgtatggacggcaaattgtatttctgtattgacttcctgcatgtaaaaccgggaaaaggtaacacattcatgcgtactaaattgaaagatgtggttaatggttacgttttggaacgtcgtttcaacatcggtgaaaaattggaagatgtacgtgtggaacgtcgtccacaccaatatttgtatatggaaggtgcagactatatttttatgaatcaggaaacattcgaccaaattcctattgctcatgacttgattaacggagtagacttcctgttggaaggaatggtggtggatgtggtttctgatgcttctacagaaacagtattgtttgctgatgttccggtaaaagtgcagatgaaaattgcttataccgaaccgggtctgaaaggggatacggctaccaatacgttgaaacctgctacagtggaatcgggtgctaccgtgcgtgttcctttattcattaatgaaggtgaaacaattgaaattgatactcgtgacggctcatatgtaggccgtgtgaaagcataatctatttatatatgcatataaaaaggcggaacttgttgcaagctccgccttttttatgtttctttgtacttctctgtgatggataaaatcaaaataaagcaatgagatattcttttattataccggtttataatcgtcctgaagaggtggatgagttattgaacagtcttacaaggcagacaaataagaattttgaagtcctgatagtggaggatggttcatctgttccgtgcaaggaagtggtagataattacgctgaccggttggatatatgttattatttcaaatccaattccggccccgggcagacccgcaattatggagcggaacgggggcatggagaatatcttatcatattggattctgattgcattttgcctgaagggtatttggcggctgtcgagtcagagcttcaacggcagaaggcagatgcttttggtggtcctgaccgtgctcatgattcgtttaccaatatacagaaagcaataaattatgccatgacttcgttttttactaccggaggtatccgtggagggaagaaaaaaatggataaattctatccccgtagttttaatatgggggtacgggctgaggtatataaagcgttgggaggattttctaagatgcgttttggagaagatattgatttcagtatccgtatctttcaagggggatatgcttgtcggttgttccctgaagcatgggtgtggcacaagcgtcgtaccgatttgaagaagtttttcaagcaagtgcataattcgggtattgcccgtatcaatctgtataaaaagtatcctgaatcattgaaagttgtacatttgttaccggcactttttactataggaattgtattcctgttgttatgttcgttggtttgtagctggagtttgtctttgctgctgctttttgctcttatcatttgtgtagactccacattgcgaaataaaagtttcaaaataggattattatccatccttgcttcttttattcagttgattggctatggaactggtttcctgcgggcctggtggaaacgctgtgtgttggggaaaaacgaatttgccgcatttgagaagaatttttataaatagaattttaccatgaagaggtattaaaagtgatggactttttatgcgtctttatggcggggaaaaataaagaaagatggcagaaaaactaaccataaaccaatgggcggaagaagatcgtcctcgtgaaaagatgatgttgcatggagtggggacactttcggatgctgagttgcttgctattttgataggttcgggaaatacggaggattctgctgtggagttaatgcgtaaagtgttgagtgattatcataatagtttgaatgaattgggcaaaaccaccgtagatgaactgtgtcactataaaggaataggtcctgccaaagctatcaccattttggcggcttccgaattgggaaagcgccgaaaggaggaagaaggaaaagaacgtaaggtcattctcagctcccgtgatgtttatcaatatttttatccgttgatgtgtgatttgcctacagaggaatgctgggtattgttgttgaatcaggcttccaaagtaattgaccgtataaagataagttccggaggcctggtctctacagcggtagatgtccgttgtgtattgagggaagcattgttgaaacgggccgttgccatggcactttgtcacaaccatccttccggcagtatgcgacctagtacagaggatgatcggttgacggaacatcttgacaaggcggcaaaagtaatgaacataagactgatagatcatgttattttaacggatggcaaattttatagctatgctgatgaaggaaaaatatagaaaatcattaaatttgcaatcgtactgtggttatcagtagtttcaaactttataattcacagataagatataatttatagaatctttccctaagcctatttcttagagtagaattcctgcttattttaatcgctttatatattctgatggagacattccatattcctctttgaagcattctctaaaataagatacggagttcagcccaacttgatgggctatttctgaaatattatactttcctgagagtaatagttgctctgccttcctgagcctcagtttacggataaattctcctgttgacatcccagtcagggcttttatttttctgtaaagagaagaataactcattgataactcctgggctattgtgggcacatctattttctcatccatcaagttttcttctatgatctttgttattctttcaatgaattcattatctattttgtttaatgattctttgatgatagattgcttaagatgggtgcttgaagatattaaggaagctatttttttccttccttctaatagattggctactctgcttttaagtaaagatgcactgaaaggtttggtgacgtaggaatcggcaccggcatcatatccttctgttttatcttgtaatgtgtctttcgctgtcagtagtattacaggaatatggctggttgcaatgttatttttaatttccttgcataactcgatcccatccttcacgggcatcatgatatcactgataactatatcgggaatacttgtgaaggcaacctggcatccttgttctccattctcagcaacaataacatcgtaagcacccatcagtgcttcagcaatataatcacggatgtcgccctcgtcttctactactaaaacgatgggtttacttgacttctcttcatctatggattctttgagattagtattgatatgtatggcatcgggataggaattattggttattagccggacacggaaggatgaacctacattaggctcactatccaccaggatagttccttcatgcaaatctactaggttttttactaaagcaagtcctataccgaatccgggcatgttttttcttatattagtttgataataccgttcgaatatacgtgagatatcttcttgggggattccaatccctgtgtcagctatttcaatttcggtgtattccacatcattagctattactgaccgcaaagcaagcgtgatggttcccttataggtatatttgaatgcattggataaaaggttatcaacaatcatggaaattacttcctggtcaaaatatatctgtattttgtctgcatcagtaatcatatcaaatgtgatatcggcatttcggttcagttctttatatttgaaaccgatttcctgaatcttttcgacaatgtttccttcaattacacataacttcttgttttgggtttctgttttacggaactccaatatttgagtgaccagatttagcaagcggattgtgcttttatgaataagagaaatcttcttcaggtgttctttttgtattcttgaatcgcattgtaaatcctcaagtggtccgagtattaatgttaatggagttttcagttcgtgagtgatattggtataaaatctcaatcgttcttcatttaattcctgctgtttctgggctttttctttttcgagtgataaggaactacgtaactgcaaacgttttttataagatttgataatgaagaatacaatagtggttatacttactatatatattaatttagcccaccaactgagccaaaacggaggattgatgctgatgaacagggttgagtagttagtctgccattcctgatttttataacgcgccttaatatgcaatttatagttacgataaggaatattgcgaaatgtaacttgattatctcctcctatattaatccagttttcctccaatccttccagtttataggcatattcaactttaccttgcagggatttgttcatgacgttaaacgttatgctgaatatattctgattatggttaagcatgatttttccgtttgtcataggtatggatgtgtcaattgcatcttcgtgagggtttctgccatagactttgaaatcggtaaatattaccggaggaagaattatatttgaaggtctgtctttggggttaaagtagcacacgccattgatactgccgaaataaatagttccgtcttgtgccttaccaactgagttgttcatatatgtaccaaatagggtaccatccttatggtcataatttaggaatctttgctctgactcgatgaaacgactgatacctgaatgggtgctcagccagatattaccttccgaatcttcttcaatggaacagattaaattgcaggctaatccgttttgggtattaaacaattggtaagtatctgactgctcattggggaataagactaatccttctgttgttgcaatccaaattctgtttttggagtccctgaatatctgattgattacacaattttcgaatatagtgtgctcatttatatgtttcatggtcttactctccggattatatatactaattcctttattgagagtgccgatccatatattcccgtttttatcttgtgagacagctttgatttcattagtcaagagttggctgttctctttattgagaaaatcttttttcttggttatcaggttgtaaatttccagtccgttgttactgccaatccatacgtttctttggttgtcttcaaagagacaatagataactgaaccatttccctgcggagtgtaatggatgaatctgccttctttgcttataaaaacatcgatccccatttcattatacatatttccaaaccataaatctccgttagaatcttttagagaagaatgataagtatttgatgaaatatctcctgtatcatgggagtaaaacatacaattcctaccatcaatgttgacattgatacctcccccatcggttcccatccatatattgccattgtcggcaacacatattgttaatacctctttgtcattaagcccattagtgacccccggtatcttattgattctccaactatgaaagaaggatgaagtgctgctgataaagctggctcctccgccgtttgaacctatccaaacgtttttgaaggagtcttcaaagacacaataaacggttggatttgatattccccaataaatatcttgaataaacatatgattaacattcttttttccggataaaatcaggtctgtatctttggagtcgaaataacaaagatcggagactgtacctacccatattcggtcatcactggtactatagacattatagatagctctttgtatcgtatagtgaattccactgacatctttgaaattgcggaatgtttctctgaagggatcaaaaagcgatagtccgcagttggttgcaatccatattttagaattggtatcaacaaatatagaatggatagtattatccggaagtgaatttttgttttgagatgaatgagtgaaattcttaaaactgttgttatccggagagaaaatagtgaatccgttataggtatgtccgatgtataaatcaccattactgccttcagccagtgtcatgatatcatttgagggaaaatcaggaactgtcgatgtattataatgtatgaactgtgaattgtcgggattatataaatctaatccttgattcgttgcaatccatacattcccgttggatgtgactagaatgtcttttatttcattggatatcagtgtgttttggttgtttttatcatgcagaaaagatgaaaattgctgtgttgcacaatcaaaaacgttcacgcccatccatctgttggcaatccataccttattattaatagtgtctgtagcaattttattaatatcattgctattaagcaattctttattgggttcttttaggtagacagtaaacttatctccgtcgaatctattaagtccatatttggttgcaaaccatgtgaagccatatttgtcttgggcaatatctgttacatagttactggataatccatctttcatgactaaattaatagtcggaatctgctggcagaaaccttctatggagtaaactactaatgagagtaataagattaacttaaatgggtcactctgtttcatctttctactatttttatcttcaaaattactatttaatctcaaacaaatacaaaaatcagtattaataagcacaatgatggtcgcaatccttccaaaagtcgcccataattctgtcattgaaaaatagcggtggtattctgaatgatacagatgcctgaagtcttgactctaatttacctttgttcggtgaaatcttttggagagctaattctccatgctatgtgaaaccttaaaatgatagcctatgagaagcacataagagttacagttctttttaatttctgcttgtgaaaaacataatgaattagtttaagtagttaattttaaatcactattattttatgaaacattttcttatttggattttcttgttttttttcgcaatgtccggttttgcgcaagatttgaatatcaaagggcaaatcacggatacatccggtgaatcgattattggtgtgaatgtaaaggtgaaaggtaaggataccggtactataacagatatagatggcaattatcatcttcaagctgctccgaatgatattttggttgtttcttatattggttttattactcaggaagtgcctgtgaaaaatagaaaggttgttaatatacgtttgatagaagatgtgaaggcattggatgaagtggtagtagtaggatatggaacacaacgtaaaactgacttgacgggtgccgttatacgagcagatattaaaacgttgaaaaggtctcccaactcaaatgtgttgcaatctttgcaagggaatgttccgggacttaatattgggcaggtgaccaattcgggaggtactccgtccatgtctatccgtggtacgaatactttgggaggaaacaaagatgttttggttattttggacggaatcatttatacaagttcgttatcttctataaatcctgatgacattgaatctattgatatcctgaaagatgcaagttctactgctgtatatggtgcacaagcagccaatggagtagttatgattaccactaagaaaggtgtggaaggaaaaccgaaaatcagtttctccagcagttatacgttttctaacccgacccacaattatcgtccgatgaatcgtgaagagtatctggataatgtcagagacttctattatacagaggctttccttgggcctgattatactactcctaatccggactttgatctagcgtctaaattgccggatgctccgttgagggatgaaaatggaaatatcagtccttataattataactggtggaacgaaggaacacaaagcgggcatttgtttgaaaaccgttttaatatatccggtggcagtaaatccatcaattatatgctttcgtactccaatacggatcaacgtggatttattgtaaatgatgattttaaaagaaacagcattcgtctgaatttgaatgcggaaatagctccctggtggaaaataggaattcagacttttggtgcatttgtgaatcaggatggtgcggagccgggtttgtggaatctgataacccaatctccattgattgaaccttatgacgcagatggtaagataaagccatatccttttaatacattggataccaatccttttatgggatcagatattgatgattacgagcgtcataattattttttcggtaatatatcatctgaaataaaattgcctcttaaagggttagtgtatcgattgaattttggtaataactataggatagacaatcattttcaggccagccagtatggatacaatctgcaaggagaggcttataaagagcataccggctactatgattatactatagacaatattctggcttacaatgctacatttggcgaacatcatattgatgctacattattgtatggggcttcggagcgtaaatacgattatacaaaggctttgggacagggatttacacgcatgacattgggctataatagtctggaacaggcaacaacgcgctatgtatattcggatgcttggagagaggctctttgttatcagatggccagggtcagttatcgtttgatggaccagtatttgataacgggtacagtgcgtagagatggtttttcgggatttgcggcgaataataaatatgcgactttcccttccatagctttagggtggattatctcagaagagcctttctttaaaataccttggattgattatctgaaactgcgtgggggatatggtatcagcggaaatcagaccagcagatacaaatctttgtccactgtggcttctgaaatcagatatatttttggtgatggtggaaagcctgtaatcggacaggagatttcggctttgggaaatagtaatctgaaatgggaaaaaacagcagggataaatttaggtcttgattttacaattctgggacaaagactcaccggttctgtagaatactattcgacaacaacgaaagacttattgtatgatgtggctttgcccgatattacgggattttcaaagatagcttctaatcttggaaaaatcaagaacaagggtttcgaatttattctcacttcgaagaatatacagacttctgattttaaatggactacttcactcaatttttcgacaaactccaataagatcgtaactttaacaggagaagataatgatggagatggcatagaggatgataacatatccagtaatctgtttataggccagcccatatctgcggtatatgggtatgtagtagatggcatttatcagttgggtgatgatatacctgccggtttctatccgggtaattatcgtattgttgatatgaccggagagggagaaataactcctgaagaccgtgtcattttaggtaaaggagatccggcttaccgatttggtattatgaatacgttagagtataagaacttcacacttagtttctttatcaattctgttcaaggaggaaaggatggatatctggcagccaactcttcttcgttggtcagagatcagaataatctgcgctggaatcgtataagtgcatgggattactggtcaccacgtaatccggatgcagtctatgcacgctccattagtaccccgaaaataactcctacggtatatgaagaccggagctttgtacggttgcaggatgtttcattgtcttatgcttttccgaagtctgttacgaacaaggttggtttgaatgaaattgatctgtttttcagtgggaaaaacctgctgacttttacaaaatggcatggttgggacccagaagctggaagtacttattcggacagaccggtaatgagaagtttttcttttggtgttagtcttacttattaatctgatttattatgaaaataaaaatatatattattaccttgttgctttcagcagtgctgggttcgtgcagcagttcttttttggatgagaagcctttggattttatgagtgcaaccaattcttttcttacccaagaggatattgattgttctgtaaataatctctattacctggtgagaagggaattctatagcagggatgaaaatcgtccgatggactacctttacggcacggacattgtctatgatggcgaaccgaacggtacggaacggcattcgaatatgatttcagcttatcattcaactggtaatattgcatcggtacactggtcattgctttatcataccatatcaacggctaatactattatcgaccgtctgcctgtttcagaagtatcggaggaacaaaaggtgattgccgaagccaaagcccgtttctttagaggatttgcatacaggaccttggcttatctgtacggtggggtacctcttttattgacggaagtcgtcgggcctaagtttgattatgtcagggcatccaaagaagaggtgttggaacaggctatttcagatgtagagtttgcggctacttatttacccagtttgtccagtgtgcaggatggagaagtgtctaatacagcagcatatcatttactctcagaactttatttggcaacggctcaatatcagaaagcggtggatgttgccacaacggtcatcgatgatccggctaccggactgatgtacaatcgttttggttccagagccaatgaagttccgggagatgtatattgggatttattccgaaaaaacaatcagaacagaggttctggaaacacagaaggaatctgggttattcagattgaaactgacacccccggtggaagtggttctttgacggctaaagaccagacatatactttggaaaggcatcatgctccgatggtacgtgacgtgaaagcacatggaatgaatcctttcagttggccgattggtgactataccggaggccgtggtataggctgggccatttcaacccgatatttcagtgatgagatatggaaagatgatttttatggagatatgagaaatgcaaaccataattttgtgagaaagtttgcggttcataataaagagtatgccaaactttacggggatactattgatactcagaatccgccggtaggggttacagttccctcacgttcgctctatgcatatcagtccaagtgtactactccatacaatcatccggaaggtttgtattccaattccaaaacttttgcgcttaacagtggagctggggctacatatacggatcaatatatgtttaggcttgccgagacttacttgctgcgtgccgaggcatatctggctttaaatgataaggacaaagcagcagctgatatcaatgttattcgcaatagggctcatgcgaaaccggtattgacatctcaggtaaccttggattatattctagatgagaggatgagagagttgggcgtagaagaaagacgtagaataacgttgatgagaatgggaaaactttatgaccgcgtgatgaaatgcaacccctattatgccaaggagatgaaaaagcattatgaattatggccgataccttataaggaaatagaagcgaatagaggagctgtgttggagcagaatcccggatatgaataaagtagataggtataatattaggcattaagaatagagggtatgttgtttttaatcattgtgtgtctgcatttgcagacacacaatcaatagtaattaaaatataatttatatgatgatgagattttggttcgtattcatatttatgtttcttccggcgatatgctggggacagattattgttaagaaaactggaggtggggcagcctttccgttagtgtcttctcatgaaacagtgatttattatgatgcccgggattatggtgtagtagaaaaaacagcttgtcttttggctgaagatataaagcgggtgactgataagaaagtgtctgtttcttctaaaaaggtttcttcggaatatgccgttgttgtgggaacggtgggacataatgcttttgttgaccgattggtggcaaaggggctattggatgtatctgccattcgtggtggttgggaacagtttgtcgttaaaacgatagatgctccggtcaaaggggtgaaaaaagtacttgtcattgccggatgcgacaggcgtggcacagcctacggcgtatttacattgtcggaggccataggggtgtctcctttgtactggtgggctgatgtgccgacgaaaagaaagtcccaattatatgttgagcatataaactatgtttctcaggcaccctctgttcagtacagaggtatctttattaatgatgaaggttggggaataactccttgggccggaaggacgtttgataaagaattgggtgacatcggacctaaaacttatgctaaggtatgtgaactgattctcaggatgaaaggcaatatgctggcacctgcaatgcatccttcttcgggcgcttttaataagtatcccgagaataagttggtggcagatagttatggaattataatgagcacttcccattgcgaaccgttactttttaataacgtaacggagtgggataagaaaataatgggagaatggaattatatgactaacaaagaaggaataaataagatgctagaccaacgagtattggagaatgccccatatgagaatatttatacgattgctatgcgtggtattcatgatgccgggctcgtaggtgttcccaaagataaagaagtcaacctggtgcaggaggttattgctgaccaaagaggtattttgaagaaacatatagattctcctattgactctatacctcagatttttgttccctataaagaagtgcttgatatctacgaaagagggttgaggcttccagaagacatcatgctggtttggccggatgataatttcggatatatcaaacggttgaacaataaggaagaaagaagccgtagaggtggggcgggcgtatattatcatatttcatatttaggcgaaccgcatgactatttatggttgaatacaactcctccggcattgatgtttgaggaaatgcgtaaggcttatgatactggagcaaaacgctattggttattgaatgtaggagatatcaaaccgggtgagctgggtatgaaaacttttttggacatggcctgggatattgataagttcgattttgataacataaacaatcatcaggtggactttctggtttccatattcggtgaaaggtatagggaagacattgaagatgtaatgaatagctattatcatttgggcttccagcacaagccggaggcaatgggatggggatatgaatggaataatgaacatgttcaggagaggatgacggatactgacttctcttttataaattataatgaggcagaaggcagaatacaagagtatgaccgtatttctgataaaagcgaaaagatatggaacgcgttgccagaatcccataaggctgctttttatgagttggttttctatccagtgaaaggagcggcacttatgaacaagaaaatgctggtcgcgcagcaaaacagatggtatgcgcgtcagggacgtacagcaaccaactatttggccgatagagtcaaatcctatcatgatagcatagattattataccgataaatacaattccctgcttaatggtaaatggaatcatatgatggctttggcacccggatggactgccacctatcagaagatgcctccgctgacgactatcgatgtacctcaaaaagcagaaatgcggatttttcttccggaacaggattcccctttgggaaagactacattgaatgtgcttccttgcgtaaatccttatacccggaaagaatcttttattgaattgtacaatgtaggaaagcaagcgttcacgtggaatgccaaaacttctgattcctggatcaaactcagcagacagaacggaactactcagttgcaagaacggattattgtatctgtagattgggtgaaagttccggtaggggaaaggataacgggtgaaatagaggttatatccggcggtcgtcaggaaaaggtctacttaccggttttcaatcctgcttatcctacagtgggcgagttgaaaggatggtatgtggaagataatggctgtgtatctatcaatccgggaaaataccatagaaaagtggagaatgaagatataaagataaaagtcataaagggattgggctatgagaaccagtgcatacaattaggagaggccgtagaaccagtccaaaatccacgccgttccggggaggctgccaaggtggaatatgatttttatacttttaatgctggttcggtaacggtttatacgtatgcattacctgtctttccggtgaattcggaacgtggcacttgctttggtataatgatagataatggcttgttgaaatatgcttcgaataatgcaaaagaatattcaggtgaatggagggagaatgtatatcgtaacagtacgataaacgctgtaaccctgaatattgataagccgggcaagcatactttgaaattgatatgttctgaccctggtatgattatccaaaaagttgtgatagatatggggggaatgaaacgttcttatcttggaccagaaactacaattgtacgatagttagttggatttctgaggataaaataaggattaagactggtcgtgtttgtgaatcacatgacgttaaataatatggatttgaaatgatataaaaaacagaaatagctcgttattgacaaaagtgatatcgatggcgagttttttctttacaacaatggttgaacggaatttagtggtgaaattgttaaaaacggtgtctagagtgtttttcgggcaatgcgttttccttttgcttatctacatctcttttggacgcttatcggtatggttttcaaactaaccgactatttcattaagtttctcttttcaacagtattttttatttatgataaatatagaaattgattttataatatcaaaaaagaattttattctacaaaaaacggtgcgtgctttagttaaagtaaatatcgcctgcacgcttttggaaagccttctgtagatatctgtagaaacgtttggtatactgttgcgaaatcattaaatttgcaattaaaacaacgagagatatggatgcagatacccgtttaaaaacagaagagaagattatagccatgttgaaaaccgtatatgatcccgagattccggtgaatatatacgatttaggcttgatatataagattgatttgcaagatgatggagaagtagtgttagatatgacattgactgcccccaattgtcctgctgctgattttattatggaggatgtacgtcagaaagtcgactctgtggaaggagttacttcatcggtcgtgaacttggtttttgaacccgaatgggataaagatatgatgagtgaagaagctaaattggaattgggtttcctctaataaattgaaagttgagaattaaaattggaaaataagaattgccaatatgtctaagttattggacaaggtgttgtttttttaattctctattctcggatttttaatttatgaggtatttaatttagtaagattatgaagaacgtatatttcctttccgatgcacatttaggttctcgtgccatagcacacgggcggacacaggagcgccgtttggtgaattttctggatagtataaaacataatgctgcagcagtgtacctgttgggagatatattcgacttttggtacgagttcaaactggtagtgccgaaaggctatactcgtttcttggggaagatttccgagttgaccgatttgggagtggaggtgcatttctttatcggtaatcatgacatctggtgtggtgattatttggaaaaagagtgcggggtaactattcatcgtcagccgttgacctgtgagatttatgggaaggagtttttcttggcgcatggggacggattgggagataaagatgccaagttcaaattgttgcgttccatgtttcatagtaccactttacaaacgctgttttctaccatacatccccgttggagcatagaacttggcttggaatgggccaagcatagccgtctgaagcgtgaaggcggtaaggaacctgagtatatgggagaggacaaggaaccgttggtcttgtttactaaaaattaccttaaagatcatccggatatcaattattttatttatggtcatcgccacattatgctagacttgatgctgagccgtacttcacgtatgttgattcttggtgactggatacaagatttttcgtatgctgtatttgatggtgaaaatatgttccttgagcagtatgttgagggagaaagtcaatattcctaaaaaaggctactatgcatcacgcgtagcagccttctataatttatatatttaaccaaacaataaaattacttattcagaatagccagagtatcgctggcaatcatcagctcttcatcagttgggataacagctactgtcactttggagtcatcggcagaaataatagcttcttctccacgaaccttgttcttttcaaggtcaatcttcacacccatgaattccaaaccttcacaaacttcagaacggcaattggcttgattttcacctacaccgccagtgaacaggatgatgtctacaccacctagagcggcagcatatgcaccaatatatttcttgatgcggtagaaatacatcttttcagccaaaatagctttcggatttccggcagcaacagcggcttccagttcgcgcatatcgctggatacacctgaaacgcctaatacaccactcttcttgtttagtaagttggatacgccggttgcatttaatccttctttttccatgatgaaagtaacggcgcctgcatcgatgtcaccactacgagttcccattacaagaccttccaatggggtcagccccatactggtgtctatacatttaccatctttgatagctgaaatggaaccaccgttaccgatgtggcaagtgataattttctttcctttcggatcaacgccaaggaattcgcatacacgttgtgaaacatagcgatgagaagttccatggaagccataacggcgcacaccgtatttttcatacagttcgtatggaatggcatacatatatgcatagtcgggcattgtttgatggaatgccgtatcaaatacacctacttggggaacgttgggcagaatggcagaaacagcattcacacctttcaggttagccgggttatgaagcggggctaaatcgttgcaagcgataaaagcatccagtacttctttattcagcaatacggattcgctgaaacgttctccgccatgtaccatacggtgacctactgcgttgatttcatccaatgacttgattgcgccatattccgggctcaccaatgtattcagaatgaactcgatacctgcggtatgttctgggatgtctttttctaatattttcttttcaccgttgggcaaagtcagtttcaggaaagagcctaccaagccgattttttctataccgccctgtgccaggacttctttggtagtcatatcaaataatttatatttaatagaagaactaccgcaattgagcactaatattttcatgatgttgttgttttttggagaatgattatttgttttctttagcggcaattgcttgattggcagtaatggcaatcatcttataaacatcgtcgatagagcaaccgcgtgacaggtcattcaccggacgagcgataccttgcaggatcgggccgatagcggtagcgtgtcccagacgttctactaatttataagaaatattacctacttccagacaaggaacaaccagtacgtttgccttacctgcaatttctgatcccggggctttgcttgcaccgatgtgcggaaccaaagctgcatcagcttgcagttcaccgtcaatcttcaaatcgggagccatttccttagcgattgccaaagcttccaccactttatctaccacttcatgtttggcagaacccttggttgaaaaacttaacatagctacgcgaggatcaattccggcaacagccttggcggtctgagcggtacaaactgcaatttgagccagttggttggcatccggtaccggggttacagcaacgtcacccattacaattacaccgttatttccgtattcgggagcatgagtcagcaacagcatggcaccggatacgcaagtgatacccggagtagtcttgataatctgtaaagcgggacgaagtacgttacctgttgtgttgcgtgcgccggccaactgtccgtcggcatcaccagccttgataatgagacatcctagatacagcggatcgacaaccagtttgcgggcctcttcgatggtcataccttttttcttgcggagttcgcacagcaattgtgcatactcttcttttttcgggtggtctgtgggatcgataatagtggctttaccgatgttccctaacccccattgtttagccaggctcatgatttcatcggggtttcccaataaaataaggtcggcaacaccgtctgtcaatatttggttggcagcttttaaagtacgttcttcagttccttccggaagaacaatgcgctgtttgtttgctttcgcgcgctcaacgatttgagaaattaaatccatgataatatattaattatgtacgttctaaagacgagtgttgtttttcacgatgcaaaattagctaattttgcaatatctacattgcaaaatcaatattatttttggtttaaagtatgctaaaagtgtatgttattgaacaccaaacgggatgtttccttaactttgcgcagttttcaataagtatttaataaatttataaggtatgattcgtcagtgcgccattttatttggctgtttggctttgggtgaattgattgtttttttgacgggtatcaagctgccgtccagtattataggaatgctgttactcaccctttttctcaaattgggttggataaaactgcaatgggtgcaggggctgtccgatttcttggttgctaatctgggctttttcttcgttccgcccggtgtggcactgatgctttattttgatgtcattgaagcacagttttggccgatagtaattgcgacagtggtcagtacggttttggtactggtcgtaacaggatgggttcaccaattagttagaaaatcaaatggaatatttagaaaataagttctttttgctggcattcaccttcggggtgttttttttgtcacgtgtcttgcagaaaaagactggatgggtggtgttaaacccgatcctgcttaccattgccgtgttgattctgtttttgaaatttaccggtatcagttatgaaacatataatgaaggaggtcacctgattgaattttggttgaaaccagcggtggtagcgttgggcgtgccactttatttgcagttggagatgataaagaaacagttgcttcctattgtcatttcacagttggcaggttgtttggtgggattggtggccgtggtggtcattgccaaattgctgggagccactccggagattatttgttcattggctcctaaatctgtgactactcctatcgctatggaggtttcgaaagccacgggaggaattccgtctttgacggccgctgttgtggtggtagtcggtctgttcggggcggtgttcggcttcaaggtacttcgggtaggtcatgtggggagtcctattgcgcaaggtctttctatgggtacggctactcatgcggtaggtacttctacagcaatggaaatcagtgggaaatatggagcatacgctagtctgggattgactttgaacggaattatgacagcgattttcacaccgacaattcttagattattaggtgtgatttaacaaaaaagctgttatctttgttatatatagaaaatcatcacagattatagaggattgatttgattttcaataggtatggtcattggggtgagcattgcttataaaaagtctatccgcatttagtagtaacagagcattcttacagcagtctgataactattgtcactttgaatgaaatgaagattctgtgatttgtggtgagaaaacaagcaacccatattttatgatagaatttaaagatataactttagcggataaagacttgatacagtcctttaccttaggcagtttgcgtcgtaattgcgacttgtcgtttgccaatctgtgtagttggattttcctgtaccagactaaatatgccgtgatggataattacctgttgctgcgtttctatgcgggagaagaattggcctacatgatgcccgtcggaactggagatgtgaaaccagttcttgaagcattgataaaggatgctgaagagatgggggcaaaattgcgtatgctgggggtatgcgtggggatgaaagcggacatagaggcggcgatgcccggacgtttcacttttacagaagaccgggattactttgattatatctacttgcgtactgacctggcaaccttgaaaggaaagaagtttcaagccaaacgtaatcatatcaacaagttcaagaagcagtatcctgattatgaatacaaaccgttgactccagatctggttcccgaatgtttgaagctggaagaggaatggtgtcgtgccaataactgcgaggaacaattggcattgggggcagaacgtaagtccatgacatatgccttgaaccatatggaggcgttgggtttgacgggcggcgtgcttcatgtcaacgggaagattgccgcttttacatacggtgctcccatcaatcatgaaacatgggatacttgtgttgaaaaggcggatacgggaatagaagggtcgtatgccatgattaactatgaatatgcaaatcatatcgacgaacaatatatatatgtaaaccgcgaggaagaccttggtctggaaggtttgcgcaaagcaaaactttcttatcagcccgttattttactcgagaaatgtatagcagagctcaatgactacaaaggatgaagtgaaaacattatggaaactctgcttcaatgatagcgatgagtttaccgacttatatttcaagatgagatataaggatgaagtgaacagggtgattcgtgaagacggaaagattatttccgcattgcagatgataccttatcctatgactttttgtgatgaggtgatttctacttcgtatatatcgggtgcttgtacgcatccggattacaggaagcatggagccatgaaacgcctgctgaaggaaacacatcggtgtatgtatgaagatggagttttgctggcttcgttgattcctgcagaggaatggttgttcggttattatgccaggtcgggatatgctccagtttttgggtatgcggttgagcaggtaagggtagacagattacgccctgcgcccggttgccggatagaagtatgcgaatttcccggtgtggaacattatcattattttgattcccgtatgcatggacgcaggagttgcattcagcatcctaaagaagattttctggttattatggccgatttaagactgggtaatggcaaattgctggttgcctgggaagcggataaaatagtggggatggcatttacggtaatgggggatgatacattatatataaaggaattgctggcagatacggatgcggtgcaggatactttattgtatgaagcggcccatatatataaggtacagcgtatggattatttcattccgtcgtctgccgatactttgtttttggggatggcaagagttatccgtgcagaggagttgttgaaggttttcgcccataagtatccggcatccgaactttatatacatattgagggagatgaagcgattcaggagaataacggctattatacggtacgggatggtttctgttttcgtgagagagtaccggaaaaaaaatatcacacttatacgttggatggttttacccggttgttactggaagcggagcatccttatatgagtttgatgctgaattgatctttattactggttgcctaggttgaatttctatgtttaagattgataatcagtggagtaaaaatccggataggttattagtcttcttttgtcagaatacgttccagctcttcggcagtcagtctgagatggaattgtcctttataagccacggatatgccacctgtttcttctgaaacgataatggccaatgcatctgtttcctgcgatacgcccatggcagcccgatgccttaatcccaattctttagggatattcaagtcgtgagataccgggagaatacaaccggctgcttctatccgtttatggcggataatcatggctccgtcatgtaatggactgtttttgaagaaaatattttctatcagtcgttggttcacattggcgttgataatttctcctgtacggatgatgtcattcagaggtacacttttttcgatgacaatcagtgcccccaccttccctttgctcatgctcatacaggcaagtacaatcggcataatatccgctttttccgtcttttcctgcttgtttcccgtcaggaagcggaaaaaacgtcccaactgtttatgcgagcccagtgtgacaaggaaccggcgtatatcatcctgaaaaagaataatcagggctaggacacctacactgaccaatttatcgaagatagaccctagcagtttcatttccaaaacctgagatacaatcagccagatacctataaataccaggataccgatgaagatattgatagaacccgaatctttcatcagacggtaagtctgataaagcagataggctaccagcaggatatcgatgaggtcttttatactaaaatcaataaacatctttctagaattaaaaattgaaaattaagaattaaaaggcagcggagtctttcatcttctgtactatcttcacggtttctacagcagcttttacatcgtgcactctgagaatatccgctccttttagtagggaaatggtatccagcactgttgttccgttcaaggcatcatcaggggttccgcctagcagcttgtaaatcattgatttacgtgatatgccgaccagtaacggtagttcgaacaggctgaattcttccaaatgattcatcaactggtaattatgttccactgtttttccgaaaccgaaaccagggtccagaataatatcttttactcctaagtcgcgtaatttctgtactttttccgagaaatagagaaagacttctttcaacagattgtcataatgcggattcatttgcatattttgcggcgtgccttgcatatgcataataatataaggtactcccagcctggcaaccatgtcgaacatctgcgggtccatttctccggcggcaatgtcattgatgattgccactccgtactcctctacacacatccgggctacatccgcacggaaagtgtccacggacaccacacaaccgggatgatagcgattgatgatttccagtccggtacgcagacggcgcatctcttcctcggggctgatgtgctcggcattgggacgtgaggaataggcacctatatcaatgatggaagctccttcttctattatttgggaggtacggttgataatatctttttccgtttgctgccggctgccggcatagaaagaatcgggtgtaacattcaggattcccattacttgcggatgggagagatccatcagtttcccattaacattaatatatttgacggttttggtttccattgtttacggcttgtcatttaggtcgtacaaaagtacgcacaattcttgagtttttgttatttcatgaactatttttcagttatctttgttgcaacttaatttaaaagcaaagcgaaagatggatatttcagctttatataagtgttttacggaatgcggcaaggtaactaccgacagccgtaactgccccgagggttctatgttcatagctctgaaaggggaaacattcaatggaaatgcatacgcgcttcaggcgctggaaaaaggttgccagtatgccgtagtagatgaaaaagaatatgccgccgatgggcatccgcgtatcttgttagtagacgattgcttgaaagcattgcaggaactggctaattatcaccggcataaaatgggtacccgaatcatcggcatcacgggaaccaatgggaagactactaccaaggaattgatagcctcagtgctgcaaaaaagatatgaagtgctttatacacagggtaacttgaataaccatatcggtgttcctctgactttgctgaggctgactcccgagcatgaactggctgtcatcgagatgggagcgaaccatccgggtgaaatcaaggcactgacccgtattgtagaaccggattacggtatgatcactaatgtgggtaaggcgcatttggaaggcttcgggtcttttgaaggggtcatcaagactaaaggtgagttgtatgagcatctgcgttacaatggcaagcatattattttcattgacaaggacaatgagtatctcacagctatctctcagggtcttacccgtatttgttatggtatggaaggaggagagggactttatatcagcggcaagctgggcgcttgtgctccgtttctttcgtttgagtgggaacacgagggacagaagttcgaggtgaatacccaccttatcggcagttataacatgaagaatgcattggcagccattacggtaggccggttcttcagtgtaccgtcccggcagatttgtgaggcactggaggcgtatgttcctcataataaccgttcgcaattgacagaaaccacggataataaactgatagttgatgcatacaatgcgaatcctaccagtatgatggcggctttggagaatttccggttgatgaatgtcgctcataaaatggttattctgggtgatatgaaagaactgggagaaaccagtcatgaggaacatcagaagattgcggattatctggatgaatgtaaatttgaccgggtacttttggcaggagaggagtttggcaaagtgattccgtcctttgaacattttaaagatgtggttgcattgaaagagtcgttggaaagatataagccgaaaggatattatattctgattaaaggttccaacagtatgaagttgagccagcttcaggaaatattatagttaaccggttggcagtttcattcacagtaggaggatgaatgtgtcaaaagtccaaagtaactattaaatgtgctgtttgcacttgtataggtatattgtcccacctgggtggaactgccatttcacaaaggtggaactacgctctcaccagggtgaaatgcccattccacccaggtgggatttctatatatgctgcatggaaacatgaatggcaaagatcctttggggaatgatccttcacatagtctgcctctatggtaaatgtaatcatagaatctttcttctttattatttctctgaatttttctttaaaatagatataataatcggttttgaccgttttctgactccttcctgccgaattattatcccgtgttattacagaaatcagttacttttgcaatgttatcaatagaattgctatgaggaacttatttctactaatcgcattatgctgtgtggctttttctgttcgtgcccaacgtctggttgaagtggggaaaggctttagcagtacttcggtaaatactactgtattccgtaataactccattgtgacgcatggaaacacacaatacatttcttattatgacgctgaaggatggctgatgttaggcaaacgccgtctgggcactggggaatggattttgcaccgtacccaatacaaaggacatgtaaaagatgcacataacattatcagtatgatggtggacggcgacggctatcttcatctttcttttgaccaccacggacataaactgaactattgccgcagcattgcccccgatacacttgttttgggagataaagagccgatgataggcaacgaagaagaagatgtgacctatcctgaatttcatttgttggctgatggcggtttgctttttgtatatcgctcgggcgcttccggaagaggaaatatggtaatgaaccgatatgatgtgaaatcccgtaagtgggagcgtgtgcaggatgtccttgtagatggagaaaacgagcggaatgcctattggcagttgtatgtggaccaatcaggaaccattcatctttcctgggtgtggcgtgaaacctggcatgtggaaaccaaccatgacttatgctacgcccgttcttttgacggaggtagaacctggtataagaccaacggacagaagtatgagcttcctatccgcctgggcaatgccgaatatgcctgccgtattcctcagaatgccgaactgataaaccagaccagtatgagtacggatgccggaggtcatccgtacatcgctacctactggcgcaatcccgatagtgatgttccccaataccgcatcgtttggcatgatggcgtgaactggcacaaccgacaggtttccgaacgcaagacccctttctcactcaaagggggaggaaccaagatgattcccatgtcccgtccccggatggtggtggacaatggagaagtgtactatctgttccgtgaccaggaacgtggaagcaaagtttccatgtactataccaaagacatacagtttggtgaatggcacgtgaaagacctgacggattttgccgtaaatgcgtgggaacccagtcatgacacggagttatggaaaatgaagaagcaacttcatatttatgtacaggatacccgacagggagatggcgagaagcaggtggaaacagaaccgcaaatggtttatgtgttggaattgtaaataatgtgctgatttgccaatgaccatgcggcatatagcgcaagcacattaacacattagtaaattggcaaattgataaattattaatatgatgaacaaattattgaaacaaacccttgtttgtgcaggtaccttgctgctttccatgcaggttgccgccaaaccttcttccgaagccaaggaagtacgggggattatagacaaggtaaacacttattggcaaacgcataacaagcccgaagtccgttcgttttgggacaatgccgcttaccacaccggaaacatggaggcatactttctgaccggtaatgaaaactaccgtgcatattctgaaacctgggctatacacaatgaatggaagggagccaaggaaaaggataagtctaaatggaaatactcttacggtgagagtgatgaatatgtattgttcggagattatcaggtttgttttcagacatatatcgacctttatactattcttccggacaactataagatagcccgtgcccgcgaagtgatggagtatgagatgagtacacccaatcatgattactggtggtggagcgatggtctgtatatggtaatgcctgtcatgaccaaactgtataaggtgacgggtaatcatctctatttggataaattgtatgaatatattgtatattcggatagtatcatgctcgaccgggaaaccggcctgtattatcgggatgccaaatatgtttatcctaaacacaagacttccagcggaaagaaggacttttgggcacgtggtgacggatgggtgcttgccggactggcgaaggtgttgaaagatcttcccgctgattacgagcatcgttcttttttcgtaaacaagtatgtgaaactggccgaagcagtcgcagccatccagcaaccggaaggctattggacccgtagcatgatggatcccactcatgctccgggaccggaaaccagcggaacggctttctttacttacggtttcctttggggaatcaataatggctatctggatgaggctgtgtacaaaccggtgatagataaagcatggaactatttgacaaagactgctttgcagaagaatggcaagattggttacgtacagccgattggtgagaaggccattccgggacaagtagtcgatgctgattctgaagctaatttcggggtaggtgcttttctattggctgcttgtgaatatgtccgttatctggaagctcctgaaaatcaggatcgcgcctactggtgcaatctgctttataagatggcagctcccgtactgagcaatatggcggaaggtaatctgaaaaagaatatgctggtagaggtgagccctaattgggatggacgtaacaaaggggtgacttatatggaaaccttcggacgccttatggcaggtgtcgctccctggctgacacttcccgatgatgatacggaagagggacagatgcgcaagcaactccgtgaatgggcattgaaaagctatgccaatgcggtggaccctgccaatcccgactatctgttgtggagaggacacggacaggccttggtggatgcggcatacgtggccgaaagttttctacgtgcttacgaccagctttggatgcctttggatgacacaaccaagaaacgttattttgaagaatttacccagttgcgccgtgtggacccgccttacaccaactggctgctgttttcttctaccatcgagagtttcctggcaaaggcaggagcggaatgtgacgaataccgtatcaattcggctatccgcaaggtggaggaatggtacacgggagatggctggtatgcggacggcccttctttcgctttcgactattatagcagttatgtcttccatcccatgtatctggaaacgttgcagggcatgaaggatgcagggaaatacactcgtattcattataaaaaatattatgaccgcgccttgaaacgtgccaggaaattcagccttgtactggaacgcttgatttctcctgagggtactttcccggtattcggccgttccattccttatcgtttggccactatgcaacccttggcgctgatggcttggtatcagcagttgcccgaaggggtgagcaacggacaggcgcgtgccgcactgacttctgtgatgcaccggatgtatgacaacaccgagaacttcaatgaggcgggattcctgaccatcggttttgcaggccgtcagcccaatgtggcggattggtacaccaataacggcagtctttatatgacatcactggcattccttccgctggggcttcctgccgcacatccgttctggacagatgccgcacaaccttgcacacaagccaaggcatggggtggacagcctttcccgaaagaccatcactggagtgatgatatacgcacttgggatttattctgattgcttttaaatccgaacgccgcagatgatacgaagttgtttttatacttatccgtatcatctgcgttgttcgtgtttaaaaaataaaagctttgtgtcatctgtatctgaaaatggcaaaaagatagtagctttgcatccatgaaaacaaaacttctccctattctgagatatatagtacttgcattgcttcttctgtgcattgtattttgccgtttttttcccgtcatggccgaagggtatgcccgtcatatctatccgtggctgtcggcggcgttgtccgctatagcttctgttttccctttttccttggaggaggcgctggtggtcgtaatcattttatggatgattatttatccttttcttaaacgccggaagaagaaaagctggagattcattgtgggcagggaagtggagttgctggcatgggtctatatctggttttatctgggatggggcttgaattatttccgttacgatatttaccggcggatggaggtggagcctgccggttacgatgaacaggcattccatcgtttccttgtttcctatacagatagtctgaatcagtcctatacggctgaggtgaaaacggaccctgaaaggatgcggcaggagatcaaggagatttaccggcaggttccgtctatgtatggcttggctcttccccgggattatcagcatcccaagcaggtgtggtttaatccgctttattcgggtgtgggggtattgggatatatgggacctttttttgcggagtcgcaattgaatgaagaattgcttcctgtacaattgccatttacgtatgcccatgaactgtctcacctgttgggggtaagtaatgaggcggaagcgaattattgggcttacagggtttgtcgctcttcaaagcggccggcggtgcgttatagtgcctatttcggtctgttgccctatgtgctggtcaatgcatcttctgtgttgacggaagaggaattccgtgaatggattaagacgatccgtcccgaagtggtgaaggattatgaatataaacgtatgtattggaatgagcgttatagtaccctgttgggtgaagtgcagaataaaatttataacctgtttttaaagggtaacaacataccttccggtagaaagaattatgcggaagtgatcgggatactgctttctttggaagaaaaatagaaacagaatgttcaggctggacttgaattcgattgtgacagttataacttgatccaagagttctacaacaaacgagctttatattgttgctccactgctaccactttttatcggcatttcagcaggaagggtggtaacagtggcagcagaaataaaaactctaaagaagaactgctcaggatgataccaagcaatgatcagaatccgccagggagtctactgtttctgtttcacataatccgaaggcgacattccgtattcgtccttgaaacattggcggaaataggccacactgctgaatcctatcatataggctatttctgaaatagtatattgtccggacatcagcagttccactcccttgcgcatttttaccttacggataaattcgttggcggacatatctgtcagtccttttatcttgcggtaaagggtagagtgactcatgcacatcttgtcggcaatgaaagcgatatccatcttttccatttccagattctcttcgattatttgcgtgattttctgcaagaattcattatccagtttgtttaacgaactcacggcactttcctgtttgggctgcgtatcggccagtgccagcaaagaggctattttcttacgggtttccaacagattgttgatgcgactgtgcagcagcttggcactgaacggtttggtaagataggaatctgctccggatgcatatccttcttccttgtcttgtaaagaatctttagccgtcagtaagattacagggatatggctggtgcgcatatcctcttttattcgcttgcaaagttcgataccgtccatgaccggcatcatgatatcactgacaatgatgttgggaattcgtgcctgtgccagttcccagccttctttgccatccttggcagtgattacttcatagatatctgtaaaagagctccggatgtattcccgtatgtcggcattgtcctctaccaccagtacaatgggatgattttcggttggtgtatcggtaatggtggtttcctctgcatccatcggcttcttttccatatcatgttgtgtatgaatagcgttgggatacgtattctcggtgagcagacgcagtgtgaatgtggttcccgtatccactgtgctttctactttcaggattccttcgtgtaactcactcaaacctttgaccagagcgagcccgattcccgaacccgatgcctgatatttgctttttgcctgataatagcgatcgaaaatgtgtggtaacgcttcggcgtcaatgccatgaccggtatcactgacactgatttccgtgtattttatctggttctcttctactgaacggagtgataaggtgatatctccctcggaagtatatttggcagcattgctcatcaggttgtccagtatgatggtgatcatgtccgcgtcatagaagatttccgtatcttccgtttcgatatgaatatgataatttactttgttattgggattcaactctttgtaacgtaatcccacttcctgtaccaattgtcccagatctcccttggctacagataatttacggttctgggtctcggtcttgcggaattccagtatgcggtttatcagattcagcagacgggtggcgctatcatgaatgatgctgattttgttggcgtgtttgggagataaggtggcatcactcaacaggtcttccaatggacctagaatcagcgtgagcggagtacgcagttcgtgggtgatgttggtgtagaagcgcaggcgttcttcattcagttcttgtttgttcagactttgcttgcgctccacttccagtgaactctctaagtccagtttacgtttataaaaacggagcaatgcatataatgcgaagataaacaatatgacatagcccaatttggcataccaggtaagccaaaggggaggagcaattaccactgtcagttgtgctgcattctcgttccattcctgattgcgaaatcgggttttcactttaaacacatagttgccgtgcggtatgttacggaaggtgacctgattatctccttgggtgctgtaccatgcattctcaagtccttccagcatatatgaaaattctacttgtgaactttgtgtataatccaacacattgaaagatatgttgaaagtgttttgattataaggtagctcaacaattctgttactgattggaaccggtaaccgggtatccctgctttctgtctgtttattatagataaagaattgggtgatggtaacaggggaaacttcgcgtggtgatgatagttcacgcggattgaaataacatgccccgttttgggagccgaaaaacagagtaccgtctggagtgatgcaagtggagccatccatgaaatcacccataggtataccgtcatgataattataattgtagaatcttttgtttttttcatctagacgagaaatgccaccattggtgcttatccatatatagccgtcatggtcttcctgtatggcacgtacctgtgtgttttccaaaccttcctttgcaccgaatgacacaaagacattaggttgacttacatctttaaaaataataataccttcccgggtggcaacaagaatgcgtttgcgagaatcttccatcatataattcacggcattggatggaaatgaatggtctgttgtgaaattataaagctttttatcatcttcatcaaacaccactactcctttgccgaatgttcctacccataattttccgtttttgtcccgtatgataccgtgtaccataatatcgggtaactgggcgtttaattctttctcgtacgacaattggttattaaaataagaataaattcccgtttgggtacctatccatatcttaccgtttatatcctcactgaaggagcagatatcgaggaactccgagcctttatctcctatccgggtgatacgtccgtctttgggagtataaagcaatatgccatttttataagtgcctagccacagtcgttcttgtttgtcttggtaaatcacattgatatgtgtttgtgggtgcagccggcattcgtgtaaagagaagttttttgttttctttcctttttcataaattcctaattcaccttctcctcccagccatatttggtgattatctgcccataatccccatacttgtttattattgatcttaccttgtttttcaatggtataggcaatggtgttgaataatggctgtgcataactgataaaatccactccaccgcggtagttgccaatccaaatatttccgaatgaatcttgtatgatgcttcgtgcattgggtccggataatccatggttgtcatttgttaccgtaatattggagaatgtaatcttttctggagatataaatgtattttccctgagattgagaatactcactcctcccatgttggtacatatccatagagtgccgtctttcatttgtttgatatcaagaatctgatctgacaataatgagttttcatttccttctatgtgtttgaatgtgatgaatttttcgctttgcggattgaaaagtgccagaccgttgttggtgcctacccatacgttcttattcttgtctatgcatagagcgcgtacttcattatcgggaatgctataaggattattgggatcatgctgataattttttgcagtacggtctttaagggatacaatgcttaatcctctgagatgatggccaatgtacaaattgccgttaccgtcttcttttgatacccagttattaccctccagaccttttacattcttagaagaatagggggtaaacaatttggttttccgatcatagtaatcaactccgaaatgataatgtgtgatccataagccgctgtcggcagcaacagataagtctgtgatatcattactgagcatataattgcccgtggcaggaatgcgtgatatggtttctgtttcataatcaaaataacaaagtccatctcgttgtgtgcctatccagactttgttttcataggggtctgcaagtacgacattcagttcgttaccactcaatcctgaattattcttggtatagatgttgaattgacgtccatcaaacctgttaagaccagattcggttgctatccataagtaaccctttttatcttgagtaacactgactacataattgctggacataccgtcttccactcccaggcgtttgataacataaggttgtgcagatgcatggaacagataaataaaacttaataataatgagattgaaaatgaatatgtgtgtttcatataaaggtacttttatgagtacaaatatatagtattttctaaaatatttctgttaatgtacatgacatattcagcatacgacaactaaaaactcgttatgaacgatttttatatccttcttgctcagtttttctctacttgtcttttacaatatttttatatttgtctcgggaaaataaaacagattaaaaattctaatgcttatgaaaacatagacttaggttctttgcaggtttggtccggatgcctttatatacaattcggagttaggaatgagagtttattaccttaattaaatctaattataaaagaaagacgatgaaagaaaattcgtttaaaagaaatcgaaaggctatgatggctttgctgctttgtacaggtttcattgtaactcagccaatcagtgttatggctgaagagattatgatttttgctcaaactgctcagcaacaaaaacaatccgtttcaggagttattaaagatgctacgggggaacctgtaattggtgctagtgtgctagagaaggggactacgaatggtacaattaccgattttgatggtagatttacgttgaatgtaattcctggcactacactaataatctcttatattggttataagacggtagaaatgaaaattgtagcaggacaaccaataaatttaacattgactgaggacagcgaaatgttggaagaagtggtagtggtagggtacggtacaatgcgtaagaaagacttgacaggttcggtagtacaaattaacccttccaagattgctgatcaaaatccgacttctgttcaagatgttttgcgcggtacaccaggattgcaaataggttatgatgcatcggctaaaggtagtgatgcttctattttgctacgtggacagaattctttaggtaccaatgcaagcccaatgattgtattggacggtatggctttttatggtgaactttctgaaattaatcctgatgatattgcacaaattgatgtgttgaaggatgcttcttctgctgctatttatggtgctaaggctgctgccggtgtcattattatcacgacaaagaaaggtaaggagggtaagccggttattaatgtaggtgctaatctttcggtttctagaaaatcagattatcgcgattattttgatgcggctggttatttgaaatttcatcaggactggcgtaaaatgtattatacgtatggacagggtgaggatggtttgtatgactactatcaagcaaaagatggtagtggtaatttgttatatccagctggttattatgatgacccccgtaccttgacagaaggagaacagaaagcatgggcctccaatataggtgtcagtggtattggtcttagtgaaggtgaatccatgcttggtctgtttgcccgtcgtttagaattcaataattctccgatgatgatggaaaattttttgaatggtcgtatggttgattggaatgatgccactttccgcactggtttcaatcaagattataatgcaagtatttcgggagctactgaacgtgtgaattattacttttcattaggttacattaataatgaaggagctgtacagggtaatgaatacaatgctttccgttctaacatgaaaatcaatgcgaagattacagattggttggaggtaggagcgaacgttaatttccaggaccgttcggatggagatattcaagtatctcttggaagtaattattgggataataatatgttgcgtaattctccatatgcttccatgtatgacaacaatggtaattatgagcaatatcctatgtctggtttgcctaccaatggtgggtacaattactactttgatcgtcagtattacgatttggaaaaggggtataccgtattaaatactatttttaatgcaaaaattactttgccagcaggtttttcttatcaattcaatattgctcctcgttatcagtggttctatgaccgttattggatgtctgctgatttgcctaatgcatctgctgctgatcgaggtgtgaatcgtggttggtcgaaaaattttgattggaatttgaacaacaccattacatgggacaagatatttggcgagcatcatttcaccgcaaccttagtacaagaggctgaagaacaccgatattggagtgataatgttaatgcacgtaacatcacgccgagtgatgctctaggtttccattatacgcaaggggctaacaagactcagagtggctttagtactaatgatactcattatactgctgcttcctatttggggcgtttattctatagcttcaaggatcgttatatgtttacaggaacattccgtcgtgacggttactccggtttcggttctaataatccttggggtaactttggatctgttgggcttagctgggtattctctgaagaaaactttatgtctgatgctcacgattggatggatatgggtaagttgcgtttgtcttggggaactaatggtaaccgtgaatttggagatgtttactctacgttgtctaatttgtcactggcaggtggaagtatggtatattaccaaaatggtaactcgaacgttgtcaatccactttatatgagtcgtttggctgcacctaatttagaatgggaaaagactaaagcgtggaatatcggtttggatttttcatttttgaatggaagacttactgctaacatggattattatttgaagaaaacaacagacatgataatgagccagcgtttgccgagtttttctggtttcggttccatcatggccaatttgggtgaagtacagaaccaaggctttgaaatcgctttgaattctacaaatattcaaaatcggaattttacatggaatacttccgtaggattttctattaataagaataaaattaaccatatctactatgattatgacgagaatggtgtagagaaggatgatacttctaatggttggttcatcggtcaggcaatcggtactatatggtattatgaaaccgatggagtttggcagaatactcctgaagacattgcttctgctgctttggtagggcagaaaccgggtgatccgaaagtggtgaatcactatactgaagatgaccggattttggaagatggtactcgcatacctgtctacaatgataatgataaggtttatcaagggactacagctcctcctgtttactggaatttacgtaacgatttcactttgtggaaggatttgactctttctgtttcattatactcttatatgggacacaagagccgtgctggttattggttgaatcaggagaacggagggtcacaggtaactaacggctttaatgtggcagctcgtaaatattggactcctgataatccgactaatgattattgtcgtttgaatgctgcaggtcccaatacggggctggctaatggtgtagataaagtttacaaccgtagtttcgttcgtttggatgacataactttgggttatactttgccacagaaatggactaggaaatttatgatagaccgcatccgtcttactgcaagctgtaaaaacgtctgtacttttgataattgggaatatggtgatcccgaaactggcggattggctacacgcacttttaactttggtattaatgtaacactctaatttctgaaaaatattatgaaaacaagcaatacgatatttacaaaagcatgtatggtactggctgcgaccgctttggtgaacgttggctgtacggatgattttttgaaacaggaccctttgtcgttttacaatcccgaaaatacttacacaacagaatctggtttgcaatcagccttggctatgtgtgattatggcttgaaagaaatgctgatggacggaaatggtaacgtgatgcctatggcttccctttatttcatgacagatattggtctgtatgggaaaaccgatgcgggcgatatgcaagatgattttgccaataagataactccgacatccggtatgaaaggtggtggggatgagaatgctatgtcacgtttctgggaccgcacatggaatagtgtgacttttgcaaatactattatctccaatgtaggtaaagtagaagggttggatcccactttgcgcgatgaatatttaggacgtgcttactttcatcgcgcctatgcctactatcacggtgtattattgtttggcgatatacctttaattacgaagctgattgaagtacctaaacaaaactataaatccacgagtaaagaggcaatcttccaaatgttggtgcatgatttggaattcgctgtaaaacatgtgtctccacagaaagagatcggttatataggtactgtcaaccaagaagcatgtaagcaattgcttatcaagtgttatttagttgtaggtgaatatcagaaagctgaacaattagctaccgatttgattaacaatcatggtttggctttaatgaatgctccgtttggaacgaatgtttcttctggtaatccggaaacatggccggtagaacgtaatgtaatttgggatttgcatcgtggagtaaatataactgatgcttctaatacggaaatgattatgcctattttgaattattatgctgaaggtttcatttcctatccgcagatgcgagctatgtgtgtgcattggagtaatggtattatccgtgatcctcataacttaggatctccaacttataattatgcacgtactgctggggaatatgatgcgaaattagattgggtacgcgctatgggacgtggtattggttgtttccgcacttcttatcattataatcagaccatttggaattatgatggtgaaacagattggcaggatatgcgtcataatcgagaaataggtaattggatggaaatgacggatcttaaatacaataatccaaattctgcttattatgggaaaaacatgatgctttatgcaccagaagattattatgatccggaatcaggtgatttgttggtgagaaaaggggatttgctttgttctgatactattcgtagttggttcccgactccattgtacaaagtatatatacttgatcaaaatgctgaagaaaatatgggggctaatcagtttaatggagcaaccaagggcaatagtgtgtctaatggtaatctatacttgttccgtttggcagaaacttacttacttcgcgctgaggctaagttctaccaaggtaacccgattggcgctgcagaggatgtgaacgtagttcgtcgtcgtgctaatgccaaaaagatgtttactactgtaactatcggtgacattgctgatgaacgtgctcgggaattgtatttggaagaatggagacagcctgaattgactcgtatttcttggtgtcttgctcgcagtggtcagccggatgaatggggagaaacttataatctgtctacttgggataagcagagtggtacggatttgaatggaggaagctattggtataagcgtactacgcgctacaacattttcaatcatgggcctattgtttccaacaaggaattgaattatcaagtagataagcgtaatctgttttggccgattcccaactcggctattactgctaatacaggtgcgcggttgcggcaaaattatggatatgacggctatgatgaagcaattccgatgtttactaattgggaagaagcagtggctgatgaagaattgacaaaataatgatagttttcaacaggcgttgttgatactgataaagcaagtctgattaacttgcgaattagattataggaggactacggcttgaagtgattttaacccgtagtccgttttttttagaccttttagatagaggaatataaaattcggaattcattatagaaaaatcgttcatgcttaatttttctactactcttgattattttttagccttttttattcttttaaaactttaagtttgcaacgtgaaaaatagataaaacgaactttaagtataatgcttatgaggaataaatctgcccccgattaatattgggaatgtgacaaaatttagcccaaggagtttctaatcataactctattcggataatattattacctataatctaatttaataagaaaaacgatgaaatcaaactcgttcttaaaaaatcgaaaggctttgacagccttattgctttgcacaggtttcgttgcgactcagccgttcagtgtgatggccgaagaaattgtaactgccgtacaaactgtccagcaacagaaacaatccgtatcaggtacgattaaagatccggtaggggaaccggttattggtgccagtattttagagaaaggtactaccaatggtacaattactgatttcgatggtaattttacattgaatgtggctccaggagctacattggttatttcttatataggatataagaatcaagagatgaaagttattccgggaaaatcacttaacattattttgcaagaggatacagaaacgttggaggaagtggtggtagtcggttatggtgtgcagaagaaatcagatgtgaccggttctgttacttcagtagggaaggagcgtctgggaaaacttccggtgacgaatgtattacaagctgttcaaggtgcggcggcaggtgttactattacacaaacatcttccattccgggcgatgcaccggatgctttggtgcgtggccagaattccatcaatgctaattccgggccatatattgttgtggacggtgtgcctatcagcaagtcgggaggtacattgaatgacatcaatccgaatgatattgaatccatggaaattttgaaggatgcttcggccactgccatttatggtacaaacggtgcgaatggtgttattttgattactactaagcgtggtacttccggcaagccgactattcgttataacggatatttcggagtggaggatttttctcataaactagatttctgtgatggtgcgcaaatcactcaacgttatagagattatgtgtcacagaaccccggagaaaccatgtacaatgattatgtgaagaatgcatacgaagcggaaaatcaggccaatggtatagagaatgattggattgatgctgtatcgcaaactggtatcatccaagaccataacgtaagtatcggcggtggggcggataatgtgaagtattacgtttctgccgactatatgagtcagaaaggtgtgttgaaagggttcaactacaaacgttactctattcgtacgaatattgatatgaatgtgactgattatatgaaggtgggaactaattcctatatagtatctcataaccgtgacggtggacgtgttaactttctgatggctgaggctatgtctccttatgcaaaaatgtatgaagaagacggcagctattgcattaatccgatgtacagtgaaactttgtttaccaatccgttgatgtggactactactaatcccgagcgtcgtcagtggaatatcaatataaacggttatgccgagattgatttcggaaagttgatttctcctcttaaaggattgacctataaattcaatggtggttatgcatatatgcccaaacgttataataattatgaaggtaagtcggtgaataataagaccggttatgctgaaataaagaatgaagaaacacaaagttataccatagagaatatccttgcttataatcgtgattttggaaagcatcatttggatttgacagctttgtatgccgcttcacgtaagaaatatcaacgttcgcaagctatggccagcaaatttattaatgacgaccagcagtggcataacatgggtagtgcggaaacacctagcgtagcttcatataccgacctttatactactgtttcacaaatgggacgaattaattattcttatgacagccgttacttgtttacatttacagtgcgtcgggacggttcttctgttttcggtgataataacaaatacggtgtattcccttctgtcgctttaggttggaatattgcccgtgaatcatttatggaatcttccagtaattggttgaacacattaaagctgcgtgcgtcttatggtaaagcgggtaatgaggccatcggagtatatcagtcacgtgtgaagatggattcaggcatgttggctttaggcggagcttcgaatgcaggtttatggcccaatgatttgatggggaatgcggatctgacttgggaaaccacaaagagtttcaatgtcggtctggacttcggactttggaataaccgtttgacaggtaatattgatgtctatttctcaaagaccaacgatttgcttctgaaacgtaatttacctaaagtaactggttacaataccgtgtactccaatatgggtgaaacagctaataaaggtgtggaattgacactgaattcccgtaatattgtttcaggcgattttacctggagttccaatttggtattttcatggaataagaatgagataaaagacctttatggagacggacagaacgacttgggtaaccgttggttccttggacatccgataggcgtgatttatgattatacaatggttggaatctggcaggaagatgagatagcccgtggcgaccatttgaattgggacccgattgcagaagctggtgatgtgaagttggcggatatcagtggccctgacggagtacctgatggcaagattgatgacaatgaccgtaccatcaaagggcagacaacaccgaaatggattggtggtctgacgaatacgttcacttataaggattttacattgagtatctttatccagactacacaaggattgaaaaagaacaattcattgatcggtatggcaggtgatgaaatgggacgtcgtaataccactactgaaataggttattggactccggaaaacaagagtaacgaatggcgttcattgcgtaagaactcaaacaaacatggatatggtttcccttgtgatgccagttatacacgtatcaaagacatcacattaagttatactttcccacagcgcatgattcagaagatgggtatcggtggtttgcagctttatgtgagtggacgtaacctgtttactttcacggattgggtaggttgggatcctgaagctcgtcaggtagctcgtggtaatagttcatgggatagtacaagaggtgaaactgtatatgacagcagtaactacccgatgactaagagttgtgtatttggagttaatttaacattctaaaaaacgaagaactatgaaatttagaaatatattattaacaacttttgctgcatcggcatttgttattgggactacatcatgcagcgatagttttctggatgagaaaatgtactctagttatggtccggaagtatcagatgtaaatgcgaaattggtaggtctgcaccgtcaatatgctgctatatggggaatgtccagtcagcagggatttgtaggatgctggcaggtaggtacggatgtaggtgctcccggtgacactcagggggtagaggttcctttttacagatatcaggaattgaatgcagagaatgcaggggtaagtttcctttgggaaaaattatatgagctcattaatagtgcgaatcagattatcgcttcacaagctgaaggcggtgatgcggcggcaatagccgaagccatgttctttcgtgcttatgcatacaatatgttggtgacattatggggggatgtacctttggtgacagaatctactagtattccgcgtacagattatacccgtaatgcggttgccgaggtggatggagtcattgattctgacttggtttatgccatgtctaatcttccggtagtgggagctgccaaaaatgaaagccgtataaatcaggacatggcaagacagttggcaggagaagcctatcttcggatgggtatgcgtgatgcttcctatttcaagaaggcggaagatgcggtgacgcctattataacaggtggtaaatatgaactgatttcagcaagatatggtaaatatgcggccgagccgggtgattattatcatgatatgttccgttgggggaatcagcgtcgttcacaggggaatatggaggctatttggactttcgaaatggagtataaccgtgatgtgaatggcggtacaattgataatccgcaacaacgtcgtaactgggttcctgctttccataaactggatggtatggtgaatgcggattccataggcggtcgtggtaatggtcgtttgcgtatcagcaattttgtgaaatacggattgtatgagaaaggtgatatccgtaattctaattataatatccgtcgtgtaatgtggtataacaagcccggtttttcaaaagaagttggtattgatgctaaagggttcttggtggataaagacaaaggtgtaagaaatgtgacattaaaaacgggcgaccaggtcatccctcacgagggagattcattgaacgtattttatcctcatcccactaaatggggggcttatgatgaaaccgatgattttggttatgctgtagtgaaggactggcctgtgatgcgtttgggagaaacttacttgctccgtgcagaggctcgtttccgtcaggggaatacacagggggcggctgatgacatcaatgtgttgcgcgaccgtgcctttaaagactatcgtgcggtggctccgggtgctggtaaagtaacggctgatcagattgacattgactttattttggatgaacgtgcccgtgaattgattagtgaggagaatcgtcgtatgactttagtccggaccaatacgttggccgaacgtatcaaattgaatggggatgtggaacctgccgcaccaagcaataaggtgattacaggttttgatgccaatatccatacattgcttccgatacctctcaccgagattcaattgaacaaagacggagatttgaaacagaatccgggttattaattctgtcggatataagtaagaagatagatatataaaatattgaaagagcatgaagggcatatctcttaaagagagtgcccttattttatttcctctagtttggtgaatccgacgtgatttatttctttagaaagaataaaaagcggcttttggctgatttctgtcctattttgcacgaattatacccccttttttattagcagaatatgtatttttgaagaataaaaaacagctgtatcgggttggaactcgatgacaggtaatgaataaccccataaaatactatgatgcgacttttattatctcttttattgcttttgtcatttttgcagataaatgcacagacttatcctaaagtgattcttccgggtgattatcctgacccttctattatgcgtgacggcaaggattactacatgactcattctcctttctattacgctcccggattcttaatctggcactcgcaggatttaatgaactgggagccgttatgtcgtgtcatgcctcaatatgaaggctctgccatggcacctgatttgttgaaatacaaagatacttattatatttattatcctgccgcaggaaccaattgggtgatgtgggcgaaagatattcgtgggccgtggagccttcccgtagacttgaaggtaggaggaattgaccctggtcatgtcgtggatagggagggaaatcgctatctttatgtggataaaggggaggtgatccggttaacagaagacggacttgctaccgttggggagaagaagaaagtatatgacggatggaaatatcctgatcattgggatacggaatgtatgtgtctggagtccccgaaactgaatgaacacaacggatattattatcttacttctgcccaaggagggactgcgggacccgcaacgagccacatggttgtgtccgcccgttcaaaaagtgtgaccggcccctgggagaattcaccttacaatcccattgtgcatacatatagtgtaacggatagttggtggtctaaaggccacggcacgttgatagatgatgtgaacggtaactggtggatcgtttatcatgcgtatgccaatggctatcacacgttgggacgctccactctgattgaaccggtagaatggacggaggacggctggtatcgtaccgtatctgccgctacccctgtcactccggagcaggaaatcaaacatggattggaactgtccgatgatttcaaaggtcctcaattgggacttcagtggactttttggaaagaatatgctcccaaatccctgactttcaaggaggatatcttatggatgaaggccaaaggtcggactcctgccgacggacgggtgttgttgactaccgctgaagacaaaaattacgaaacacaagtggaaatccggacagggaatggaaatgtggccgggcttatcctgtattataatgaaaaggcttatgccggagtcgtttccgatggaaagagattctatatttaccggaatgcggagcacaagacggaacttcccaatcgtattgggaaacatttctttgccagactgcacaattgcggtaaccgtctgtccgtcgaggtgagtaaagacggggaagaatggactgtccttgccagtgatatggatgtttcctccttgcatcacaataattatggtggtttttatgctttgcgtgttggtctgttttccgctggaaaaggaagttcgggtttcagccgcttccgttatcggaatgcagttccgcgagagaaagatatgagcgcctatctgatggtcttccacaaagacgaggaccatggacttcacatggcaatcagtcccgacggctacacttttaccgccttgaacgaaggaaagcccgtcatagccggagatacgatagctgaacagaaaggtatccgcgatccgcatatcttccgtggtccggatggagcattctatctgtcgatgaccgatttgcatatttatgcgcagcgtgacggatatcgtgatacagaatgggaacgcgatggaaaagagtacggatggggtaacaaccgggggctggtattgatgaaatcttgggatctgattcactggaagcgtactaatctgcgctttgacaaattatctgctgcttacagtgaggtaggttgcgcttgggctcctgaagtgacctatgatgataaaaaaggaaagttgatgatgtatttcaccatgcgctttaagaatgaagcgaacaaactttattatgtatatgtcaatgacgactttgataagttggaaactttacctcagcttctttttcaatatcccgatgagaagatttctgctatcgatgcggatattacccgtatagaagataaatatcacatgttttacgtttcgcacgatgggggcgccggtatcaagcaggctgtttcggatagggtaaacagtgattacgagtataatgcccgttggtatgatcctgaacccacggcgtgcgaagctccgaacttgtggaaacgcattggtgaggatagatgggtgttgatgtatgatgtgtacgggcagaaggttcataatttcggattcagtgaaacttccgacttcgtacatttcactcctttgggacagtttaaccaaggagtgatgaggactactaactttacttctcccaaacatggggcaatcattcatcttacccgccaggaagcggaacgcctggcagaacattgggggatgtcttacgatgctttgcttccatctgaataagaaacattttatataaaataattcatgatgagtaaactgagaaacagcttgtgtgagttgtgcacagctttgattttcttttgcggatgcagcaatgaaccgttgcaacccattcgttcaggtgagatatggcctgataacaacggagagcatatcaatgcccatgggggcggagtaatgtaccatgatggaacatactattggttcggtgagaataaatgcgatactaccagcagtgccatggtgggagtaatgtgctattcttctcggaatcttactgactggaagaacgaaggcgtagcgctttctgttgttgataacgacagcagcgacatagcgcgtggatgtatattggaacgtcctaaagtgatatataatgcgaaaacagggaagtttgtgatgtggttccatctggaattgaaaggaaaaggttatgcagccgcccgtgccggggtggcagtcagtgatactcctgccggtccttaccgtttcatccgttcgggacgtgtcaatgctggtaagctgcctgtggatatggacggacaggctgttgcagtgctggatactctgaatgccaagaattatgaaaaatggtggactcccgaatggacggatgctgtgaacaaaggcttgatagtaaagcgtgatttggatggcggacagatgtctcgcgatatgactctttatgtagatgaggatggtaaagcctaccatatttactcttccgaagaaaacctcacactccaaatagcggaattgagcgatgactatctttcacacacagggaattatgtgcgtgtggctccggcaggacacaatgaggcacctgctatcttcaaaaaagacggaacctactggatgatcacttccggttgtaccggttgggctcccaatgaggctcgtatgttctcgtcttcttccatcttcggaccgtggtctcagcaccccaacccttgtgtgggacctaagtcggaacttacgtttggcggacagagcacttatattctgaaagtggaggggaagaaagatgcttttatatttatggcggatatctggcgtccagagcatcccagtgatgcccgttacatttggttacctgttcaattcaaggaaggaattccatacgtggagtggatggacaactggacactggatttctttcagtaatccctgttgaaaatagtctgaaggatggaaaatagtgcaatagtctgttcttgactgattattgcatccatcttgctcgattttacccctatggttgtcaatcagattttttatctttgctatcggtaaaaagagataataggtattaaagataggtttttaggaagaaggttaacatactgtgatgtgataatagaattttaggttaggttaagttagaattgaaggcatatttcgtgaggaaatgtgcctttctgttttcattacctttctaggttcgtatatttgtaatgtcgaatttgtgaaacttaaaatagaatatgcatgaaaaagattggattgtttttgttgttaggcttttctctttcgtggttggtgtctgcttgccaaggatgtcagcaggaaagacggaaggaagtgcctttggattctattgtactaagtgacccttgcattttggcagacaggaagacggctatgtattatatgaccggaaccggcggtatgctttggaaaagcaaggatttgaaactttgggaaggaccgttccatgtggcaaagactgattccggttcgtggatgggaccgaaaccaatgatttgggctgccgagttacatccgtataagggcaagtattattattttgccactttcaccaatcaggaggtgaagattgatacggtacaagggaatgtaatagagcgccgtgccagtcatgttttggtgagcgataacccggacggaccttacgttccgatgaaggattccacttacctgcctgctgataaaccaaccttggatgggactttctgggtggataaggacggaaagccttatatggtatattgttatgaatggttgcaagccttggatggtacgatagagaaaatagaactgaagcctgacttaagtggaaccataggcgaagggaaattgctgttccgtgccagcgaatcgccgtggagccgtgaaaaagatgcggatggcaaggagaaaccgaataaagtcactgacggtccgtatctgttccgtacaggaacaggtagactcggtatgatttggactagttggatttataatgtgtacactcagggagtggcttattctgaaagcggaaccttggatggaccatggatacaggagaaagacccgataactcctcccaatttcggtcatgggatgttgtttcagaccttggacggtaaatggttgatgtctgtacatagtcataaggatgtaaacggacgttatattcgtactcctcgcttgtttgaagtcgatttttccggagataaattggtggtgggaaaaccatatactccttgaaagtgctttatcttttttcgagaggaaaggtaattacttttgccttcaatgaaaagagatgtgtagaaagagttggaaggacagctttatgagtctgtccctccaaataaatgaccgggttaatcccaacccggattctgtttcagtgccccctgagccaggtctacctcttccaaggggatagcccacagatagtcacggttggcattgaacttgcgggtttcaataaaaatgctttctccttttgcatttaccccgtatactggtttagtaacatccttttcagttgttttatagctacgggtatcaaacaggtgcattccctcgaaagcaaattccaaacgacgttccaaacggatagcttcgcgcatttgatctttggacaagccggaaggcagaggaggaagatttacgctgggacgctgacggatttgattgaccgcatcatatacttccgtatccggagcagacagattttcgttacgagcctcggcgaaggtcagcagcacttctgcatagcggatatagataaagttggtccagtcataattattgataccgtcattgtccggattgatgtactttttcatgctatatcctgtacgggtatggctgccatctcccatattgttcaggttgaaagtctttcctgctatttgtgacccgttccacagtacagagaagcctagacgggggtcacggtcggcaaacgggtcttccggattatagaaaggagactctttgattgatttgccatctttgcatggataggagtctatcaagtcttgagtaggtgataaagcttcccatcctcccatcatgacgggagcgaagaactgtcctatataactgccttcattagagtttttcgggttttccagatattcgcgatcaaagatgatttcgttacataactctgctacaggttggaacaagtcaccatagttatcatacagtccatacacattcatgcccattactttgcgtgcggcggcttccgccacatcatatttgtgtgcgtagaaagcaactctggctttcagtgcgtagcaggctccggcactcggttttccgtggtcactgttgctgcggatatcgggcaagctggctgctgctttatccaataatcctactatatgattataagtctcctcttcagaactgcgtgaaggaagtttctcgttcagttccaacggatgatccagcagggaggcgccacccatatattttaatatgttagcgtatgagaaagcttcgagaaactgtacttcagctgtcagttgcgctttttctttttcatccatcggcacatcgcctatatgttcgtaaaataccaggcatctgcggatgcattgataggcatttttccataattgtaggaaatgtgggttgctggaagttgccgtaccagcagacaactgtccctgttcggctgtgacatgtacaggaatagcattatctgtgtagcagtctgtcatgatagtatggttttccggttctatcagatacagataaattccggttgcaaatttctgggcatcttctgcgtttttccagaaagatgcatcggataattggtctttaggatttctgtccagaaaactgtcattgcaagagctcagaccaaggccacatgccaatattaatcctataaagttatattttagtctcatagttgtcagtgtttagaatgttacattcagaccgaaggaataatttcgggtcaatggataatagttgccgctgatggcttcggggtctacaccgtcgaagccggaaatcataaagagattgtcgatactgcaatacactctcagacggctgattccgtatttggatatcagctgtttgggcaggctgtaacctacttgcaggtttctcagcttggcataagaggcgtcctgcatccagaaactggaagtcacacggtttttggagtcactcatggataatcggggataagtggcattcgggttttccggagtccaacggtccagatgctgttccgttactttaccgccattgtagaaggcatatctgatttcagctacaggagcactctttacatcagctgcaccttgcagcagtgcacttaggtcgaagtctttatattgaactgaaagattcagaccgaagttgattttcgggaagtaggaacccaatacttgccggtctttgctgtctactactttgtctccgttcaggtcacggtattttaagtcacccggaaccggagtatccatgctctgtgtaggatgattcttgatctcttcttcgttttggaagatgccgtcgcatacgtagccgtaatatgcccacagtgggtcgcctacggattgccccggtgtgtcaccgcctttcaaatccatgattttggtagttacatagctgaaattggctccgatagaatagctccaatcattgatacggttgttatgtcccagttgcagttcgataccggtattacgcactacgccggcattttgcatcggagcgctgactcccatcatgttgggaactggaagttgcagtaatatgtcccgtgtttccttgcggaaccagtctgcgcccaatgtcagtttattgccccaaaaagcggcgtccacacctacgttccattgatcggttttctcccacgtaatatcttggttagccatcgggttggaaatggaaatacccggagtcaaagtgttgccgaaactatagtcataaccgaacagataggtgttctgatacggataatagttagaactgttgtccgagtttacggtttcctgattacctagcaatccccatgatgcacgtagtttcaaattatccacccaatcggctttgaagaactcttcttccgatattctccatccgatggagaaagaggggaatgcgccgaagcggttgttcttggggaagcgtgaagtgccgtcataacgcaggttggcttctagcagatagcggtcatcgtatgaataattcacgcgtccgaaagctgagcggagggcgtattctatttctgtaccgtatgttgtctgtcctgtcacttcaccggcgttgatctggtccagtgagttggagttgggcaggttcttacggtaagcttgcagatagcgtgtctgtttataaatttgtgagtaacctaataaggctcctattgtgtgtttgccgaaggttttattatagtccagataagcttgcaagttcagttccatacttttgatgtcatattctgtgatggagttagtggttttctttaccggtgtgtctgaacctgcctgatagaatgtcatagtattgacgtgggtgggattgtcggtcaggttgaaagtcgaggcggcgactcctctcagtttcagtccgtctatgatgtccagttccattcctacgttaccttggaaattgctgtttatctctttgtaggttcctccttcacgtgcataggctacggagttgtgctcgtttttgaataaagcatagttgccgttgctcaattggatgggagtaaccggagtctcacggaaagcatagtgcatcaggttgctgatacctgccgccggagcagtcatattactgtggtataccgccatatttgtagtcagtttcagacgactgtttatctgagcgtcaatgttggcacgtacattgaacttgttgtagttggtattgactatcaatccgtctttatcatgatagttgaatgccagcgagtaagttactttgtctccaccgcctttgatactcaagtggtggttgttgaacaggccgttttcacttaatagcgtacccagccagtcggaattgggataaaagtcgggatcacttccgtctttgaacttttgtagggctgtttcgtcatacggacctttcaaaccgtcattggtgtaagcttcattcatcagcactgcataattgtaagaatccaaaaatttgggcatacgtgaggcactttgccagcctacatatccatcgtatgatacaatggtacgtcctttggttccctttttggttgtgataaggataacgccattggcagcacgtacaccataaatggctgaggcggctgcatcttttaatatagagatgttttcaatatcgttggggtccacgctgctcatggtagattctaccccatccaccacaaccatggcactggcatctcccatagttcctagaccacgcacacgcagtactccggcatcagctcccggctgaccggtattttggataatggtgacacctggcatttgtcctgccagcatgttggtgacattggcactggtgcggttgactagcttatcggatgagatggttgccacagaacctgtcaggtttacttttttttgagtaccgtatcctactactaccacttcatctaaagattctgtatcttctttcaagataatggtgtaactgttgctgttgcctacggtaatttgttggtcgttgtaaccgatatacgaaactttcagtttagcccctacggatacatttaatgtgaatttgccatccacatctgtaatagtaccgttggtgcttcccacttctactacattggcaccgattacaggagctccgcttgtatcatttacgatacctgtaatttgtttgacatgctgttgcacgatggcagttgactgcgaagcccacaaaggcattgggaaagccattccggcaaatagtgtaagacacgcataaaaagaggcttttttcaaaattacgtgtgtctttacacaattttcccttcttttctggtagaattgcatagattaataaggttaaattagtaaatagtttggtttagggatcttattccctttctatttcagttgctgcaaatgtattattttataagaatataacgctatcttttcttttatttttttttgttattcttaataaattacaggttatgactaacctgctgtagttttttgtgggttattcttgttattttgtatctagcgaggaagtagaatggtacatattgcttgagaaatcaaacaatgaaattcatatggatagaaatgttaaatatgtcctttctaaggattatttttgtatctttctcaaaaggtgtgatgaaaactgaatatatttcgctaatagttatcatttataatgaataatcagaatttattgtgtagctgattcttttgcttttttcttttactgaaactgtagtttaatagggaagaactttttgtttttttctatgccagtctttcataaacttccatttttcctccatttgaccgaataaagtccctcttttgaaagatttatatacctgaaaataggttcctatactatatctttgcatcaaacaaattcaggactaattatatgaaaaacaaattttttatcaccttatttgcctgtttgctaccttggatggcaggggcgcagcagattatttccaaacaaaacaatgtagccgaaaaagattacatagcttatctctttacctattttacaggtaaccacatcagcgaggaagccgtatgctatgcggtaagtacggacggatatacctattgggcactgaatgacaacaaacctgtcattgattccaaaatcatcagttctaccggtggtgtgcgcgatccgcatatcctgcgttgcgaagacggaaagacattctatatggtggttaccgatatggtttctgacaatggatgggattccaatcgtgccatggtgttgttgaaatctacagacttggtgaactggaaccattctgtcatcaatatgcagaaatgttatgccggccaggaaaaactgaaacgggtatgggctcctcagactatcttcgatgcggaagccggaaaatacttggtttattggtcaatgaaatatggtgatggggcagatgtgatttattatgcttatgccaataaagaatttaccgacctggaaggtgaaccgaaaccgcttttcatccctgaaaacaagaaatcttgcatagacggtgatatcgtatataaagatggaatctaccacctgttttataaaaccgaaggacatggaaacggcatccgggtagcaactacccgttcactgacttcgggacaatgggaggaagaacccgactacaagcagcagaccccggaagcggtggaaggtgcgggaactttcaaactgataggtcagaataaatacatcttgatgtatgatgtctatatgaaaggtaaataccagtttaccgaaacgaccgatttgaaaaactttaaagtgatagacagtgaggtgaagatgaattttcatccgcgtcacggaactatcatccccattacccgtgccgagttgaagcgcatcaccgacaaatggccttcaaaggaaatgggcaatatgacgattcccaacaatcccgtgctgcaaggtttccatgctgaccccgagatattgtattctcatcagactaaaaaatattatatctattccaccaccgacggacagcccggatggggcggatggtatttcagtgtcttctcttcggataatctgaaggactggaaagatgaaggggtgatgcttgatttgaaatccgatcaggtggcatgggcggatggaaacgcatgggctccgtgcattgaagagaaaatggtggatggaaagtattataaatatttcttctatttcagtggtaatcctgtagccggaggcggcaagcagattggggtggcggtagccgattcacccattggtccgttcaaagacttgggacatcccattattactgaatctcccgtgggccacggacagcagattgatgtggatgtgtttaccgatccggtttcgggaaaatcctatctgtactggggcaatggttatatggcgggcgccgaactgaatgaggatatggtttccatcaaaaagaataccttgaccgtattgacaccgaaaggaggaagtctgaaagattacgctttccgtgaagcggcatatgtgttctatcgtaatggtctttactactttatgtggtcggtggatgataccggttcgcccaactatcatgtggcatacggtacgtcgaaatctccgctaggtcctataaaggttgctaagaaaccggtggtactgattcaggatcctgcaaaggaaatctatggacctgcgcacaatgcagtcctacaaattccgggtacggatgagtggtacattgtatatcatcgtattaataagaactttatagatcgtgagaagggtcctggcgtgcatcgtgaagtatgtatagaccgtatggaatttaatccggatggaaccatcaggaaggttgttcccacgttataaaagaaacatgacaataaagcatataccatgaaaaagaccttattatctctggcaatcgcctcattggcagcaggccaatccgtctgtgctgccgtggaaaaagtatataatgagcccgattcggtctacatcttctcttacgcccatccggaagacgagggacgcagcggactgaaattcgcatggagtcccgatggcgacaagtggctgagtgtatccgacggctttgcctatctgaaatgtgatttcgggcgttggggggcggaaaagagaatgattaaacctcttctggaaaaagcggaagatggacgttggtattgccggtggcagcttacccccagcggaaaagtatggggtacttcccattcttccgacttgttgaagtgggctcctcaacaatatgtcaatgcggagaagcctgccatgccccgactggtcactgcccggcagattgtccttgataaagataccttgaacggttatatgcagaaagtaccttatgcggatatagaacagttgattcgttttgctgagcataagaaattccgcgatatacagaataatgagcgtaccgaacaggatgccgtccgctttgccggactgaaaccggtcactgccaccatccgggtggatgccggacgggtgaagcctattagtgagcatctgataggtattttctttgaggatatcaattatggagccgatggtggactttatgcggagctggttcagaaccgtgattttgaatattctgccaaagacggtgcaagagataagaactggaacagcacgtatgcgtggagtatacagggtactgatgcggaactgtctgtcagtgaggacagtcccatccatgctaacaatgctcattatgcagtgttggaggtacaccgcccgggtgctgccttggtgaataacggttttgacggtattgccgtgaaaaaaggtgagaagtatgacttctctgtgttttccaaagtgctggatgatacgaaaggtggaaaagtgcttgtgaggctgactaccaaagatggcaaggagattgcgcaggctgctattcgggtttcatctacagagtggaaaaaacaaaaggctgtactgacggcaacggcggatgctgcggatgccgtgttgtccgtttgtccgcagatggctgggaagtatgccttggatatggtttctcttttcccacagaatacatttaaaggcaggaagaacgggctgcgcgccgatttggcacagactttggcggaccttcatccccgttttgtccgtttccccggcggatgtgtggctcacggagatggtgtggacaatatttatgattggaaaggctctataggagcgttggaggaacgcaagcctctgcgcaatttgtgggggtatcatcagacccgcggtctgggatatcatgaatattttttgttctgcgaggatatgggggccgaacctgttcctgtagtggcagccggagtgccttgtcagaattcgggtacttgcagtcatcactcggtaggcgaactgggttgcggcggtcagcaaggcggaatcccgatggaggaaatgccgcagtacgtgcaggatgtactggatttgatagaatatgcgaatggagatgcgaagaagaccgtgtggggaaaaaagaagcgtgcgcaagccggacatcccaaacctttcaatctgaagtacatcggtattggtaacgaggatttgattaccgatatctttgaagaacgtttcaccatgattttcaatgcggtgaaggagaaatatcccgaagtgaccgttatcggaacggtaggtccgttctatgagggcagtgattatgaggaaggctggaaattcgccactaagatgggtattccgatggtggacgaacattattataacaccccgggatggtttatcaacaatcaggatttctatgaccgttatgaccgtaacaaggcgaaagtgtatttgggagagtatgcggctcatttgccgggacgtcccaacaatatagaaacagctttggccgaggccttgtacctgacttccgtggagcgtaatgccgatgtggtgaccatgacttcttacgctccgttactggctaaggagggacatacccagtggaatccggatttgatttatttcaataatacggaggtaaaacccaccgtaggttactatgcgcagcagatgtacggacaaaatgcgggcagtgaatacatcgcttcttccgtgactttggataatgcacaagatgcggtgaagaaacggataggcgtgtcggtagttcgcgacggaaagacaggaaatatgatcgtgaaactggtgaatctgctgccggtagcggtgaatgcgcaagtggagctcccctctttggaaggaatgaacaccactgccgtaaagacggttttggcaggaaaaccgacagaccaacaggttcgtcctgtatccggtacaatagaggtaagcgagaaattcgggtatgaattgccggcttattcatttacggtaatccggataaataagaatgaaaaataataatagataaataaacatgaaaaaattactgactttgttgctggcggtcctgctgctggcaggatgtgccggcaataagcccgggacattcgaagcgggtaagaatacctttctgctgaatgggaaaccgttcgtggtcaaagcggcagaggtgcattatccgcgtattccccgtgaatactgggaacatcgtattgaaatgtgtaaagcattgggcatgaatacgctttgtctgtatgttttttggaatttgcatgaggaaactcccggtaagtatgattttacaggtaataaagatattgcagctttctgtaaattggctcagaagcatggtatgtacgtcattgtgcgtcccggtccgtatgtatgtgcggaatgggaaatgggtgggctgccttggtggctgctgaagaacgacagcgtgcagcttcgtactctcgatcctttctatatgcagcacgtgggagcctttatgcatgaagtgggcaagcagttgcaggatttgcagattacccgtggtggtaacatcatcatggtgcaggtggaaaacgaatatggttcgtatggcacggacaagccctatgtgtctgccatccgtgatacggtacgtgccgcaggctttactgaagtgcctttgttccaatgtgactggagttctaatttcctgaataatggtttggatgatttgctttggactataaattttggtacgggagctgatatcgacaagcagtttgccaaactgaaagaagtacgccccgacgctccgttgatgtgcagcgagttctggagcggatggtttgatcactgggggcgcaagcacgaaacccgtgacggacaaatcatggtggatggcctgaaagagatgatggacaaaggtatttctttcagtttgtacatgacccacggaggaacgacctttggctggtggggcggtgccaataatccggcttactcggctatgtgcagcagctatgactatgacgctcctatcagcgaagcaggctggaccaccgacaagtattttgctttacgtgatatgttgaaggactatttggacgaaggacagacattgcctgaagttcctgaagctttaccggttatggaaatccctgccattaaattcactcaaatagctccgttggttgacaatctgtccgaaccgaagcagacagaggaaatccagccgatggagaaatttgaccaaggctggggaagtatcctgtaccgtacccatttgccggaagatgtgaaagcgggaaccgttctgaaaatcaccgaacagcatgactggacacaggtttttgccgacgggaaactgttggggcgtctggatcgccgtggtggagaacaggaacttacactgcctgcattaaaagccggtacacagcttgatttattggtggaagccatggggcgtgtgaactttgacaagtccattcacgaccgcaagggaattaccgagaaagtggaactggtgaacggtaagaatgccgaaacgttgaaaggctggactgtttataatcttcccgtagattatgaatttgtatcttcccggaactttcaggatatgaactcgtctgccgcctgtggcatagagaaaaatgatgaaagtgttccggcctactatcgcgctacttttaccttggataaggtggctgatacgttcctgaacatggagtcttggggaaaaggtatggtatgggtgaacggtcatgccatgggacgtttctgggaaatcggtcctcaacaaaccctgttcatgccgggctgctggctgaaaaaaggagtgaatgaaatcatcgttcttgacttgaaaggtccgaaagaggcaaccatcgtcggattgaacaaacctatcctggatatgcttcgtgtggctgttcctgaaacgcatcgtaaacaggggcagaccatcaaactggagaaggaaacaccggtatctgccggtactttcaaaccaggtaacggttggcaagaagtgaaagttcctgttacgaaaggacgttacttctgtctggaagggctgtcttcttttgataataccaacattgccgccattgcggagtttgatgtgttggatgagaaaggacagaaaatctctcgtgaaaactggaagattgtttatgccgacagcgaggaaacccgtagcggtaaccgcacagccgacaagatttatgacctgcaagaaagtactttctggcagacggtagataatacggcttatcctcatcaggtggtgatagatctcggcaaagaatataacgtgaccggtttccgtattctgccacgtgcggaacagggagctcccggcatgattaaagattataaggtgtatgtaaaagcaaccggtttcggttattgatatacttttcccgtaggggtggaaacacagactgctgaagaagctaccgaaaagaattaaagacacagatgtaaggaggaagcttcaaaagaaggaaacctgcgagtggagcaattatcggatactttagcaaattttaaaatttgctagagtatccggtttcttttttataactttgtggcagtctatgattctaaccgaaagcacaatgaaatatatattgacctttatactatcttttctctccttcttggtgtgttctcagaacataactattacagatatccctaccattgaccagctgccggtaaatgccattcatcgcgtattcagagacagcgaaggatatatgtggtatggcacggtgaacggattatgtcgtgatgacggttatcatgtgaaagtgtttcgttcggacattgaaactccgggattattagaggacaatttggtggagtgtatcgctgaggataagaaggggaatatatggttcggtacagacaaaggggtgtatattcttgataaatcggactacagtgtacatcctatggaccgggagcgtttgaagaatattccggtgatgtatctatatgctaccagtgacggctatatgtggctgagctatcgttctatattggccaaatatgacatcaacggacagttggtcaaagagtatcccctccggaataagtacggaagaactactatttccggattttgtgagagccgcaaccatgagattattatttctgtgtggaatggccgggtatatcatttggacaaagaaaaagatgagttcgttccttatcctgataagatgagaagacaaaatcctacggtgatggttcaggataatgaacaggactacttctggttggcaacctggggggatggtgtggtgcgttttgacccttcggctcctgaagattctatgtttgtatattctgaaataccggtcaatgctgccggtgaggaggatggggtcatccttagtctggtacaggatgataaactggggtatatctggttaaccaccgggcacgatttcatgtccttacaaatacaaccggataagacgttaaaacaattgaaattccagacagggcttctgcctgttaatcatatgttggtagaagtcctgaaagggaggggatgtctatgggtgtcggcctttgaccgtcctagtttcattgtacatctgatggataatatgaccaaggattatgccttgcccgctttggcggacagagtaaaccgcagtccggctgtaatggctttgtgtgatgacggagacggtatgatgtggatgatgcaagaaagaaccgggttggtgttatatgacttgaagcaggataaagtgaaaatctattcggattttcccgagcttgtttcgttgtctttggataacggacgagagatggctcgagcacgtattaataacggtatttgggtggcaaaagatttgaatagattggtttatggtatgacccgtaagggtatggagatgtatctggtggatcttattgatttgaacgggcaggtggaatcgaacgctacggtgaccaaattgtatgaagactcgcacggaatcttgtggataggcttgaacaaaggactttgcagttatgatgtccgtcagaaaagaattaaacaggtttatcccgatgtggggcatgtgatgggaatcgtggagaataaggaagggttgatatggatttgtactcaagacaacggtttgtttcagacaacggcggatgaaaaacttcgttctttcaaattggacaagaatttctcttgtctgtctattgctcccgattggattttgtggttgggaacttgtgacggaggagtctattcttatgatccttcagagaataagttggtcagttataatgaggcttgcggtatgaacggtaatcaggtgaatcaaatagtggctgatgcatataatcatatttggattgatacaaaccagaaactgatagaatttaatcctcgtaacggttcgttccgcacctatcttaccacggatggttctatcttgttgcgtcgctttcttcccactgctgtttgtcaagcaaaagatggcaatatttattggggcggcattccgggtatttgcatggttactccatcaaacgggttggaaagaaaggctagtgcagtgaagaccaagataactgatataaagttgcaaggagaatcattgatattcggagatagaaagagtagcaattccattaaccggatagaattgcatcccgatgatcagaatttggaaattagtttttcttctcttaaccaccgttatgcttcaaaaatacgctatgcttatcggttgataggagtggacaaagcgtgggtatatgtggaaggtggaaaaaactcggctttttataatcatttgagtaagggcacttatacttttcaggtgaaagcgacggatgaaaatggtctttggagtaaagaggtaactgaactgactatccgacgccttcctgctttttatgaaacttggtgggcgtatttgttctatgtattgatagtgatgggtgtatccggttatagtctgtatctttatctgaagcgcgtggaccgtaagaataatgaaatgtgggcggacagcaaggagatgattaaaatgcgtatttatttggatagtaaggtgaatttgcctgaacctgagtttgtacaactggacaaacttctattggagaaagcggtaaaagccgtggaagataaccttactgagcctgattttgatgtgacagctctagctgatgccatgaatatgtcccgttctactttgacccgtaaattgaaagccataacaggccgaactccattggattttatccggaacatcaagatgaagcatgccagacacatgttggaagataaagacaaaagtgtaacagaggttgccgctacgttggggtattttaatcggaagtatttcaccacttgctttaaggaggaatttggaatgactcccagtgagttccagaaatcacaacacgaagaataaacatcttcctgtcctttaattgttgcaaatagggggtacaaatgcgtcaagttatagctagagctatttgtatcccctgttagcatggttcttcacctgtatttctatttcctatttcattcttttgccacaaccttttacggggagaaaaacacatcttcttcattcattcccgcagtaaaggtatatataactttaaatttaatatagaatgaaacatttgtttttgttgcttactctgttaagcttttcattaacggccttagcccagcaaaaagtgacgggtaaggtgaaagattcttccggcgagcctgtcataggagccagtgttgttgtaaaaggcaataataccatgggaaccattaccgattttgatggaaactttatgttggatgttccggcaaagagtgtgttggttatttcttatattggctatgtcactcaggaagtcccgacagcaggaaagaattcattagagattgttttaaaggaggataccaaaaccttggatgaagtggtggtgattggttacggtacacagcgtaaaggtgatgtgaccagttctgtagctagtgtgaaagccgacaactttgtaaaaggagccgtgaaagatgtgggacagctgattcaaggaaaagtagccggtctggccattaccaatcctaacggtgacccgacgggaagtactcagatacgtcttcgtggtacaaataccattggtggagctaatacagctcctttggtattgattgacggaattccgggagaactcggtacagtggctcccgaagatgtggagagcgtggacgtgctgaaggatggttctgctgccgctatttatggtacgcgcggtacgaatggtgtgattttaattactaccaaacaggctaaaggagtggatattaaccaggtggagtataatggctacgtcagtacttctcttatagccaaaaagttggatatgctgaatgcagatgagttccgtaccctttatcctgaccaggaccatggggctgatacggattggattgatgagattagccgtacaccggttagccatgttcataacttgtcattgatgggtggcaattcaaagactaattatattgccaacttgaactatgcctctcgtcaagggatcatgaaaaaatcggatttcgaaagttttcaaggacgtattgaggtaacccaccgtatgtttgatgataagttgaagttgaaattcggtttgtttggtaagaaaaaccagatggaatctacaactagtgggggtagtttcagaggttgggtatatggccaggcaactcgtagaaacccgactgatccggtaagaaatgaggatggtacatggaatgagaatgtgagcaaattcgaatacgagaatccgttggctttgttgtatgaggctgaaggaaatgtaaaaaagacgcagttgcgttacaatggaaatattgtttataatcctatcaaagatttgactctttctgccgtattctcttatattcgtgacaatatgaaccgtggctacggtgaaactttgaaccatatttctgctttgcgtgatggattggctggttggtcttcggtaggtgcttataccaagatggagaagttgatggaacttactgcacaatataacaaagaaatcggtgcgcataaatttagtgtcttgggtggttatagctacaatgaaacagactttgaagagctttggattgataactatggttttcaggatgattattttggcggatggcataatattggcattggttctgctttgaaagacggtaaagcgaatatcggctcaaagaaaactcctacaaatttgatcggtttttttgggcgggctacctattcgttcaagaatcgttatttgttgatgggagctcttcgttatgaaggagccagccagttatggggtactgataatgcatgggggcttttcccatctatatctgtaggatggagaattaccgaagaagcatttatgaagaatcagaagatatttgatgatttgaaacttcgtgtgggatatggtgtgacgggttcacagcctaaagatcctttcctgggggtggctatgttgaaatacggctcgtatgcttttgtaaatgggaattgggtacagaccattgttccggcatccaatccgaatcctgatttgaaatgggaggaaaagaaagaaacaaatattggtttggacttcgtttcatggggtggccgtttgtccggttctattgattattataaccgtgatgtggatggcttgatatacgaatatggagtaccgactcctccgaacttgtataataagacgatggccaatgggggtacaatgagaaaccgtggtgtggaagtgttggtaactgtggttcctgttcagaataaagattttgaatggagcactaccggaacattctctttgaactctaataagctaatcagtttgtctggcagcatctttaagtcggattatgactattttaatacgggtacagtggaatactccggtcaggtagccgattctcacagagtacaggtaggtgaaagcatcggtaatttttatggctttaaagtagtagatgtggacagtgaaggtcgttggatctacgaagacaggaatggtgagttggtgaactataaagattttactcatgctcccgaagataagcatgttattggtaacggtcttcctaaatggtatgcgggatggaacaatactcttcgttataaaaacttcgacttgaatgtgacgatgcgtggcgcgtttggtttccagataatcaatggtggacgtatgaattatgagaatgtaaaaaacagccgttttgaaaatcgtttgaagtctgtgaatgacttggtatttggcaagcatacgttgagtccggaagtggaaccggaattcaatagctattatgtagaagatggtgactactggaagattgacaatatcactttgggatatagcttcggtcaggtaggtaaatatataaagtcactccgtatttatggttcggtattgaatgctttgactataaccggatataaaggtattgatccggaagtatcaacagatggtttgactccggggtatgatacacgtgacagatatccgagtgtgcgctcatttactttcggcgttaatgtgaaattttaatgaactaaaaaggaattgaagatgaaaacaaatataaaattatggacaatgggactgatgacagccgcattgttgggaaatacagcttgtactgatttactgcatgagagctatggacaggtagtgtctgaggattacgtaccgaaaacggaggaagatgtcagttatctggtaaatgccgcttatataccttggcgtgaaacgttgctgcaatggaacggagtggttcgtgcacaggaattgtgtgcggatcaagatgttcttcctgcccgtgatggtattggatgggtagacggttatatctataaaagatggcatcagcatacttggactaccgaggatgacggtgtgcttcaaggatgggaacgtacgtacaatggtgtgaatacctgtaaccgtattttatctcagatagaagaaggtgtgatcagtgtggatggagaaacgaaagaaaagttgattgccgaattgaaagtactgagggcttcatattattatattttgattgatttgtatggtaatgtgcccattgtgacagattttaaagatacttctttgccgcaacagtctactcgtaaagaggtctttgactttattgtgaaagaaataacggagaatatggatttgttgtccgaaacgccgagaggttattattatggacgtttcaataagtgggcggctcatacattgctggccaaaatgtatttgaatgctgaagtttggtcgggtactgctcaatggcagaaatgtattgacgagtgtgatatcgtgattaattatgccgagaagtccggagaatatgcattggagaataatcagaaggatgtttttgtaacgcataatgagaattctaaagaaattatctttgcattgccgtttgatgaaatttatgtgacaggatggaatgattttgattttcatatgtacactttagcacctgagaatcaagatacttaccaattgactgcacgtccttggggaggcgtgtgcgcagtgcctcagtttattaattcttttgatgaggatgatgcacgtttagaggataactatattcaaggtcagcaatatacctattccggtgaaatcttgaagcgtagtattgatggaaaaccattgatttatacggtagatgtcccctctattgatcagtcggatgtggatgatgggttccgttggggtaaatttgaatatgccaccggtataaccaaccgtttgagcaatgactggccgttgttacgatatgcggatgtattgatgatgaaagcggagtcattgatgcgtttgggcaaatcgggagcaggtgctttggtgactcaggtacgtgaacgcgccttcaagaatgaacctgaaaaagcgcaagttacagacgcggaactgatgggaggaagtgtatatgattatggtcggagagatagttataagacagaacatgatggaggaacggatattaaatatggtcgtttccttgatgagcttggttgggagttttgtcaggaaggacgccgccgtcaggacatgattcgttttggcatcttcactacaaaagcttggttctctcatgataagagtgatgaaaccaaaaatctgtatcctattccaaataaagtattgttgaccaatagtaatctgaaacagaatccgggatattctaaatagtatttattggatgtttttttaaggatgaaaaggttgttttttcttttctacattaaattagaaagaattatgagtaaaaagatttcaataagtttgttgctcctctgtctgggattattttcccaggcacagagctatcagaaaatgccgcaaggagttaagactactgtacaaggtatagatgttgaagtggcattttattctccatccattgtccgggtttataagacaccggagggaagttcgtatgacaagaagagccttgtagtaatgaaagagcctgaggagacctttgtggagtttgcaatgaataaagagtatattcgtttaaagtcggatgcattacaggtggaggtcaattcatctacaggtggaatcaatttctatgatgcaaccggaagggtgttgttaaaagacaaggattatggaacacagttcaccccgtttgatgatgcgggtactttttcttacaatgtccggcaggcttttttattagataaggatgaagtgatttatggattggggcaacaacagactggaaaagtgaatcagcgcaatcaaaaactttttcttcgtaacaagaatatgagtatctgtattccttttattcattcagtgaaaggttacggactttattgggacaattattccccaactatgtttacggataatccgcaagaaatgtcattcgattctgaagtgggcgattgtgccgactattatttcatttatggtagcaatgcggacggcgtgatagccggagtccgtgatttgaccgggcaggctcctctttatccgctgtggacacttggattctggcagtgccgcgagcgttataagagtccggatgaactgtgcgaagtggttgatgaataccgtgatcggaaagttcctttggatggaatcattcaggattggcagtattggggatgtgattctaactggaactccatgaagttccagaatcctcgctatattaataagatgggcgacaaagaatacatgaaatatcttccgaatggtgagaatccggatgcacgttatggtactccaagaataaaaagccctcaagaaatgattgactatatacacaagcggaatgcgcatatcatgatttctgtatgggcctcttttggtccgtggacagagatgtatcataagatggacagtctgaatgctttgcttcattttgagacttggccgcctaaagccggagtgaaaccttacgatccgttcaatcctgtagcaagaagtatttattggaatgaaatgaaaaagaatatctttgatctaggtatggacggctggtggttggattctaccgaacccgatcatctggagattcaagataaagattttgatacaaaaacttatttaggttctttccgaagagttcacaatgcttttcctttgatgtccaataaaggtgtttatgagcaccagcgtgctaccacttccgacaagcgggtattcttacttacccgttcttcattcttgggacagcagcgttatgcttcacattcatggagtggagatgtcgtttctacttgggaagtgatgcgcaagcaactggcagctggcctgaattattctttgtgtggtattccttactggaacactgacttgggaggattttttgcttggaaatataataatgatgttaataatattgcttatcatgagttacacgtccgttggtatcagtggggagctttccaacctatcatgcgttctcataattccagtcctgttgctgtagagatctatcagttcggcgataaaggtgattgggcttatgatgcattggagaaatatacccatttgcgttatcgcttattaccttatttatatagtactacttgggaagtaacaaataaggcaggcagcattattcgtcctttggtgatggattttccgaaagacaagaaagtacttgatatggatacggagtatatgttcggacgtagttttttagtacgtccagtaactgattctctctatacatggcaggataaaaaacagaatggttatcagaaaaatatgcggaaaatagagaaaacggatgtatatttgcctgagggaagtaactggtttgatttctggactggggcaaagttggctggtggccaaaccatacagcgtgaagtacctattgatatcatgcctgtttatatccgtgccggttctataattccttgggggcctgcggtgcagtatgccacagaaaaaagttgggatgacctggagattcgtgtttatccgggtgctaatgcaacttttattctttatgaggatgagaacgataattacaattatgaaaagggagtttattctactatcactttccgttgggatgatagtaaccgtactttgcacatcagcgaccgtgaaggaagatatcccggaatgttggaaaagaggaagttcaaagtagttctcgtaaatcatagatcaggagaaggcgataaaccattgaagggaggaaagatggtgaattataccggtacagcaattgaggtgaaactttagaatgttcatattgaatatccagcagaataaataaagaaacgataaaatacattatgaatttacttaaaaccattttatccacttccgtttttgctatagcttctgtagctttacatgctcagctacccgcaaaagtagaaagttttccagtcagggatgtgcggctcaccgccagccctttcaaacacgcagaggatatggatatccgttatctgctgggaatagaccccgaccgtctgttagctccttatttgaaggaagctggtctttcccctaaagccgaaaattataccaattgggaaaatacagggctggacggtcatattggcggacattatttatcggccctttcctatatgtatgccgctacgggaaataaggagatcaaggcgcgtctggattatatgataagtaaactgaaacgctgccaggatgccgccggtgacggttatctgtgtggagttccaaacgggcgcaaaatgtggaaagaaatagaggaaggaaacattcgcgcgtccggtttcggattgaacgaccgctgggttcctctttacaatattcataaaatatatgccggccttcgtgatgcaactcttcagaccgatagccgggaggcaaaggaaatgttggtgaaactcacggactggatgattcgtctggtatccaagttgagcgatgaacagatacaggatatgctgcgcagcgaacatggagggttgaacgaaacatttgccgatgtggccgctatcaccggcgacaaacgctacttgaaactggctcaccaattttctcatcacaccgtgttgcagcctttgttgagacaggaggataaactgactggtatgcacgccaatacccaaataccgaaagtgataggtttcaaacgtattgccgatttggaaggcaaccgggactggagcgaagctgcccgctatttctgggaaacggtggtaaatcattgcagcatcactattggaggtaacagtgtgcgtgagcattttcatccggctgatgacttcagcagtatgctcaccagcgagcaggggcctgagacttgtaacacctacaatatgctccgccttacaaaaatgctgtatgaaacgagtgcggacgttcattttatggattattacgaacgggcgctttataaccatatcctttccacgcaagatcctgtgcaaggcggatttgtttattttaccccgatgcgtgccggtcattacagggtctattcgcagcctcagaccagtttctggtgttgtgtgggatcggggatggaaaatcatgcccgttatggtgaaatgatttatggacacaaggataataatctgtatgtcaatcttttcattccgtctaccttgcgctggggagatacccaaattgagcaacagacggcttttcccgatgaggaggggagtactcttgttatttctccggaaaagggaaagaaagaatttacccttcttttccgtattcccgaatggacgaagccggaagcattacgcttgtctgttaatggtaaacggcagaacgtaacggtcaaagagggatatgttagcctgaaccgtacttggtcaaaaggtgacaaagtaaggctggaactgccgatgcatttgcgtgccattgcactgccggatggttctgccaactattccatcttatacggaccgattgtgctggccgcccggctgggcaagcaaaatcaggatggcatgtttgccgatgacagtcgtggcggacacattgctgccggaccgcgcctgcctttacaaacgatgcctgtcattgtgggggataagaacaatcttctttctcatctgaaaaaagtggaaggtaagccgttgacatttacattgtccggagtttatcccgaacgctatgagggtatgactgtggaaccgtttttccgtttatatgagtgccggtatatggtctattggcctgtgctgtccgtacaggagttgcaggcaaggcaggaacagttggcaaaagaggaaaaggagcgtgccgcattggatggtatgaccgccgataaagtgatttgtggggaacaacaaccggaaagcgaccatttcatccggatggagaattcccgtacgggggatgatgaagggattcactggcgtgaggcggccggttggttcagttatcgtatgaagacgaacggaaagcaggtcaataaagtgcgtatccggttccgtcccgagattcgtaaggatgcaaaagtatggataaacgggcaggaagtaggacgattggctggtaaaccggtttcggatgtatcggttgggatatttgatgtacctgcatctatgcaatccaatgagcaactggagataaagatcggtaaaggaaatgagaaagtgactccgcatatttatgaggtgcggctggtggctgaatgatgatagatatacgaaccggccatgcctcagttggcatgaccggttcgtcttttcagataattccgttgtctttcaagaccgcttgtaactctttatcagtgatattctcacgctctgatttatcataaatgaaatgtaagccaatctctttttcttctttggatagagtggcgatgagagtgatcactcttgctccacctcttttcccttttccttttgatgctatactcatgcgtactttgtgtaggccattgcctaaatcagtacccatgtcagggttctgcatgagttctgcggctaaaattgtcaagtcttgcttcaatgatttatatcgcttggaaagtttcttaacttctttttcgaagtggcgatatactttgattttatagttcattgagcaattcttctatgggacggcctttcagctttccttcacgcatcagtttgatgtctttgcaagcctcggacagcccgtccattatttcacttttggtcatgtagggttcttcatcctctgccaccatggtagaaacagattccatttcctttttagcatgaacaagagtcttccttacagactccaacacctttacattcttgatgtccaggatttcccgaatcagttcgttttgtattgattccaatgtgattgtactcatgacgttctcctttcttcttattatttatctcgtatggcaaagatagcgaaaaggtggcatgtctgcttgttttctgcatgaaaaatagttttcatttagaggttgtacctaaaagaaataccttttttcatttagttttcctatttttgcaggaaacaaaccgaacagctaatgaaaattctccatacagcagactggcatctgggccagactttttatgaatacgaccggcgggaagagcatctccattttctagaatggctgaaacagcagataagacagcatgaaatagatgtattgttgatagcaggtgatgtattcgacagcccgaacccttcggcggaatcacaacgaatgtattatcgttttctaagagaagttacgtccgagaacccttctttgcaaattatcatcattgccggaaatcatgactcggcagcccgtctggaggctcccaatcccctgttggaggatatgaatgtcaccgttcgcggtgtcgtgcgccgcaatgcggaaggtgatatagacttgcaacacctcattgtccccctttacacagaaggggaagtgaccgcctattgccttgccgttccctatctgcgtcagggggattatccttcggctgaaaattactcaaaaggagtccaactgctttatgagcagcttttcaatgaagtgaaggagaaaggacttcccgttatcgccatgggacatctgcaagccaccggctcggaaatctcggaggacgaccgttcggaacgtaccgttatcggaggcttggaatgtgtatcccccgatgcttttgatgaggctatcgcctatactgcattggggcatctgcatcgctcccagcgtgtgtcccatcgggagaatgtgcgttattccggaactcctatgcccatgtcttttgctgagaggaacaatgcttcgggagtggtcatgataacgataagtgctgagggtaccggcatagagagattggcatttgaaccgctagccggcgtgatgagtattcctcgtcaggcccgtccgctggaagaagtgctgcaagccatcggcgatttgcccgatggggatgtcacgttgcggtcaccctatctggaaataaagattttgatgaccgagccggaaccttcttataagtataagatagaggaagcgttgaaaggaaaagcggtccgcctggcacgcatcgccgctatgcttccacaaaaaaaggcaagcggcattgtcgccacttcctacgaggagttgcaaaccatccgtccgctggatatggcactggatgtctttaaacggaaatatggagggacggagatgcccgataccatgaaacaattgctggaaagtgtaatcaaggaggcaggagtatgaaaatagtagcgataagaggaaagaatctggcttcattggaaggtgaatttatgatagactttaccgtcgaacctttgtgctcggcaggtatattcgccattacaggcagtaccggagccggaaagtcaaccttgctggatgctttgtgtctggctttgtttgactgtacaccacgtatgaacaaggcgaaagagaataacgtctctgtcatggatgttgccgacagaggaattgcacagaacgatagccgttccatccttcgccggggtactgccgaggggtactcggaagtggatttcgtcgctttgacaggagaggtgttccgttcacgctggacggtgcgacgttcgcgtgggaaggttagcggttccttgcaaaaagtggaaatgacgttgaccaaccttacctccggagtggaacagcaaggaacaaagaccgaattattatcccgcatcagtgaactgatcggactctctttcgaacagttcaaccgctctgtgttgctggctcaaggagattttgctaccttcctgaaggctcgtcagcctgataaagccgaaatcttggaaaaactgaccggaacggaaatttactcgcgtatctctgcttctatttatgaacgcaccaagcgggcggaaagtgaatataaattattgcaggaacgtatcaaaggcattgagttgctgacagatgagcaattacagcaactttcggctgaaaaggaagaattacaagtccgcttgtccgtttcgaagaagaaagaggaggcgttgtccggcaagttgaaatggctggaagaagaaggacgcttgaatacaggatgcatacagtcggaagaatcactttccggcattagaaaagaaatagaagtcgcccgtccgcgttatgaactgttggctcgtatagagcaggctcaggatatccgcgatgtgtatatggaacagcgtaatgcccggcaacagatagctgccggtcgttcccggttgagcgaaatacaggtcgccatccggcagaatgcggctttacagacttccgcgaacgtgcagtgggaagccgctcagaaagaactggcggaatttaaggcctatttgtcacagcaagaaccgcaattggataaagccagagcattggatgtgcagttggtggaaaatagaaagcaattggcggaaagtcagaaagaagcggctttggcattgcaggctaaagataatctgcgtcaatccgtttgtaagacagagaaggatataagtttgttgatggagaagcaaaccgccttgcaaacctggtttgaacgatatactgcttattcccaattgattcctgccgttgaactgattaccagcttgcttaccaatctggaaatggcaagggcgcaaagcgtatcgaaccgtcaactgctggataaagtaaagaaagcgagtgaagcggaggaacagcggttgaaatcggtacaacaggaagccgagcgtctgaaccgactgttgccggcagaggtgctgttgcttcgtgagcagttggaggaaggaaagccatgcccggtctgcgggagtttccatcatccgatgagggaacagaccaatgtccaatccttgcaggaagaggaactgaaccgtgcgaaagaacaggttgctaaagaaacggaacaactgaaaaacacgctgaatgcccgccaactggagatggcccgtctttccgcattgattgaaaattatgtggcgcaagttgatgatacgctgaaaaaagtagaaacatacgtatccattattcccaattggaaagatttgttggagcagggcacattgaaacattatgtccagcaattcggcaggcaatggaatgcccgtttgcaagagcagaccgaaataaaagaggctcttacctcaaaatcagcccaaagagatagtttgaaaaaagaagaagccaatgccattggtttgtacgaagaaaagaaacaaaaagaagaaagacagcaggcagaattgaacgaacgtgctcgtctgcggtcttccctgctgaatggtgaatccaccgaaacagtggttgcaacccatgcaagacggcaaaaggaactggaacaacaactggaaaaagccatgaacttgcatcattctttaactgtgcaggcggaatcttacaaagggcagaccgcacagatggaaaaggaattagtccgtctgactgctgtcttgcaacaagacgaattgaaaataaacgagtggctcacgcttcaaaaggaaacgtatgccgagttggaacaattgctttccaaagacaaaagctggatactggctgagaaacaagcgttgggcacactgaaagagaaggaaaccactcttcaggcggtccttgcggagcgaaggcagaaaagggaggagcatcagcaagctcctctgaaaccggataccacggaaaacaaggagtcgctgattgaaacattgactgcctgcactgctgccaaagaaatggaaaccggacgtttggcccaaatagaggtgacgatacagaaccatataaaaggtaaggaacgcatagccggcatcgagaaagagttggaggaaaaaaactctatctacgagaattgggcgaaactgaacgaactgttcggttcccagactggcgccaagtttaaggaaatagcccaaggttatacgcttgatgtccttttgctttatgccaacaggcatttgcaagaccttgccccccgttacgaactgcaacgcattcctgacacgctggccttgcagattgtggatcttgatatgatgggtgaggtgcgtagtgtccattccctttcgggcggggaatctttcttggtatctcttgccttggcattgggcttgtcttccttgtcctccaatcggatgaatgtggaatcgttgtttattgacgaaggtttcggatcgctggatatggacactctgcgcattgcgatggatgctttggagcggttgcagatgcaagggcgtaagataggggtgatttcccatgtggcggagatgatggaacgtatccctgcgcaggtgcaggtggtgaagaccggaagcggaaggagcaaggtgcaggtgatgggaccaatataaggattgtactccattacagatgacaataaaataaaaaagtgacggactatgaaaaaaacattaattggattattgggctcgacagttatatgcgtactgtttcttgcaggttgtattgatgaacattacggggaggatagcaataccattgttaccaatctgaccggttatgcatgggagagaacatttcagatacgtactgaggatggcaggaatgcggaagtctgtgaacattatgagttcgggctgaatggtaaggcttcctgtaaatcacggacgacatgtgatggcgaggaagtggaagagcatgtacattatttccgatatgattttatcactcccaataacagatatcttcttctggattactgctactggcagattgacaggatcagttcttcagtattgagcatatatgaaacctttgagaatcctgtggttgtgatggggcagaccagggaatataagagtttctcggctgtcccgttgggggatgactgatgcgctatgtctgatgtgtttttaggaacagaggcgttacaggcataagtgagggaaaaatatgatttttgtctccatattgaatactgtttttacttattacttatgagaatcggaccggtgtttttgatgggattttgtattaatgttataactgtacgattacaccggaaattccatatcaaagacaaggacgttttttaaaaagatcaagagctttttaaaaaagaacaggagctttttcaaaaacaacaggatgtttttgatgcttttctactcgtattgcataacatggcaaaataccttgtttttctttcagaagtttcagcttctccgcaaacgtcctgttcatcggcttttcggctgaaggatatacacgataaaatccttcagccgaaaaagatctttcagcgtgacagggtaagcgatgtcgtattggttggttttctatcggtattcggatttacctttatacatttattgactacggctgaaagaaagaactacgcggttgaaggatctcggtgcatcaatctgtcagccggaatgccgatgaacaggacgtttgcggagaggctgaaacttctgaaggatttttgggggcattcttcaagagaggggtatttctcttcaaaagatggatacgcatatcaaaaagaaggtggaaagactttgaaaacttgtcgcaagatgtcgcaattcttgtagcaagtttttcggaatcttgtagcaggatttgcagattcttggtataggaatatcttgtttgattttatagctgtccggtaaaaatgccgaagttcccccaaaaaggtctagctttgggataaacagattcggttttaatggtaaacaaatatgattgtatcattccacaaacatgtagcttgtttgcgatatatattccgataattttagtatattttgtagaatgtgtctgtgcaaattagacgtagcatttaccgtctgtgaaaagtgggatacttattattgaacctgaatccgaatcccagcatcagatagttgggatcatggaaatcctgtaaattatatccgatatgaaggaatgagttgcgcgtaacttctatcttcagtgccaatatctggtagaaagattttaaatctccgcctgcatgaatcacatttgtacccaatcctattcctactgtgaagtaaggcatcacgtactcggcacgtcccgaaactcccagtgccagttgtttgccggcagacggcttgaggagctcatcgccgtatccgtccgggctatacacattcgcactgccgtcataaaccccgtctaatgaaatacccgcacggaatttatacccgaaattatacattggcgcgaaattaaatcccagtaccggataagtttcaggagaagcaaccatttgcccctctccaatcgttactccttttctgcgccatgaaccgaacaataccaggtcataactgatatgacggggaaatttaggtacgggtgattgatacaagggctttgcaaaacattcttcttttctattgatattgtaaaccaatcctacctttagtccgatggaattgagtcccgcattcgggaatttggtattaccgttagagaaatgcgttactgccacacctgttgtgaaatcaaatttgggagaaagcatccagttgaaatagaagtttgtattcagataggcgtttactttcgaacctatcactttattatatggattcaaatcgctgtgatatggtttccagccaaatgaagcgccgaaattccattcatagtttaatgacaatcgttggttgaaacgggcgatacgcgctccttgaaataaatagacagtaagcgggttgcccaattgcggcttctcatacatattgtagtagcccacgccaataccttggtaggcccctctgtaaatacggtcgttataggtgttcggatgaaactggaatgagtacttcaagtgaagcgacagggaattctctatgggtttccaattcagattttctcctctgaaaaaggaactggtggggaaaatatatccgggacgtgcctcaatgccgatgcggtggataaaatgacgtttcaatgacagggaatctacataaagccggtcggggatgttggttttgtctgaaatggaaaccgctgttgtgtctatagggtttccctctgtatattgattgattgtgtctttagcaaaggtcatgttacttaagaacagtaatgcatccagaagtatcacgagtttccatttttgtattgtgcctttcatatgccgtgtaatgtttttgtgcgttttaccgatctatcgtatggtctgatttttttatttgtggcacaaatataatcatagtatttgaaaaaagaaatttgttagatataaaaaggttttgtataaccttgataaccactatttaaactattttgaggatggattgtaatgtcatcctctaccatcggctccccacatcattttattgcggagtgtgttgaaaaagatatggctgtttcgttttactacatttattttatagtcggctttgcggatagtgagccggcttccttcacggcaagtttcgctacgtccgtcgatggcaatcaggaaattgtggctgcggctctctatatccaatgtgatttcccagtcgtcgttgatgacaatggggcgtacattcaggctatgcggtgctaccggagtgatggcgatggtgttgctgtgtggcacgatgacaggtcccccgatgctcagcgaataggctgtagaaccggtaggagtggcgatgaccagcccgtccgcctggtaggtggtgagataggctccattgatggctgtgtggatggaaatcatggaagaactgtcacgcttcagtaccgctatctcattcagaccgaaagggtaacctttcagttcctgttctttgcaggatacttgcaatacgctgcggtcttctatccggtagtttccattgtagatgtcattgaatgtgtcttccatctcttcaggagaaacatcagccagaaaacctaatcgtccggtgttgatacctagtatgggaatgttgcgtgaacccacacggctggcggctttcaggaaagtgccgtcgcctccgatacttagtatcatgtcggcttcaaaattatttccatcgaaaacaccggcgtgacggatgcttatcttgaggtcgtccgtcagaaactcgtagaactcccggcagatgtgaacttcagcgttatgttgtgatagaatggatagcaaacgttccacatgagccgatttcttggcttgataagtgtttccgaaaagggcgaatttcattgggcgtatattcattagttaattttataaatcttttgtttgtcaaaatggaccaggttttaataaaacctgctaactttgcacatcagaactgcaaagataataatatattgccaagatgacaaagttaagtgtaaatataaacaaggtagccaccttgcgtaatgcccggggaggcaacaatccggacgtggtgaaagtagccttggactgtgaggcgtttggtgcggaaggtatcactgtacatccccgtcccgatgaacggcatatccgccgcagcgatgtgtacgaacttcgtccgctgcttaccacagagtttaacattgaagggtatccctcaccggagttcgttgatctggtgctgaaagtgaaacctcatcaagtaacgttggtgcccgatgcgcccgatcagattacgtctaatgccggatgggataccaagaccaatctttctttccttaccgaactgatggatacgttcggccaggcaggtatccgcacctctatctttgtcggtacggacaaggagatgatagaatatgccgccaaagcgggagccgaccgggtggaactttatacggaaccatacgctacgatgtaccctcggaatcccgaagcggccattgctccttttatagaagcggcgaaggtgacacgtagcctgggaatggggctgaatgcaggtcatgaccttagtctggtgaatctgaaatatatgcatacgcatattccttggctggacgaggtgtctatcggtcatgcattgataagcgatgcgctttatatgggattaaaacaaactattgaagaatataaaaattgtcttcgttcatgatgaatatcactttactggctgcacaggcggctttggcggatacccttgccgggggtaatcccgtattgactcccgtttcagaggaggctcggatgaatctttgggatatggcgatgaaaggtggatggatcatgcttgtgctggcattgttgtctgtcgtctgtttttatattttctttgaacgcatggcggttatccgcaaggcggggaaggatgatcctttgtttatggaacgtattcgtgattatatccgcacgggtgagataaagtcggctataaactattgccgcatcaccaatactccttctgcccgtatgattgagaaaggtattacccgtatgggacgtcctgttgccgatgtgcaggctgctatcgaaaattccggcaatatagaagtggcaaaactggagaacggactgcctgttgtggcgactattgccggcggtgctccgatgattggtttccttggtactgtaaccggtatggtgcaggctttttgggaaatgtccaatgccgggaacaacattgatatcacgttgctttcaggaggtatttatgaagcgatgattactactgtgggtggtctggttgtgggtattgcggctatgtttgcctataattatctggtaacccgtgtggacaaggtggtaagtcaaatggaagcgcgtaccatggacttcatggatttactgaacgaacccgttcaaaagtaatagcgtatggcactgaaaagaagacataaaatatcacctaacttcagtatggcgtctatgacagacatcatattcctgttgctgatattcttcatgattacctctaccatggtgtcgcccaatgccatcaaggtattgcttccgcaaggcaggcagcagacttcggcaaagccgcttacgagggtaatcattgacaagaacctgaacttctatactgctttcggcaatgaggatgaaatgccgatagacttggaagaactgcccgcattcctgcaaaggtgtgccgagaaggaacccgatatgtatgtggctctttatgcggatgaggctgtgccttaccgcgaaatagtaagggtactgaatattgctaatgaaaatcacttcaagatggtgttggctacacgtccgcctgagaagaaacgttaagctgtaagcatgaagaaaaataagataacaggactgattggtacggctgtactgcatatacttctccttatcctgctgctggtgattgctatccgccgtccgcaggttcaggaagaggggggtgttcctgttatgctgggaaatacagagctttctcaagggaatgccgacccttatacgctgacggatatagatataatgaatgagcctgaggctccggctcccgatgtatctgaaccggaaacggttcctcccgttgaaacgaaagaggaaatcatcacgcagacagaagaggaaacggtggcagtccctaaaaaggaacctaaaaaagaaacccctaaaaaagaaaaacccaagaaggaaactcctaaaaaggacgtaccgaaaaaggaggcggtgaagccgaaagagaagactgaggccgagaaacgcgctgaagcagaaaaagcggcggctgagaagaaagcggctgccgaaagggcggcagcggaagcggcggcgaagaagatagccggtgcttttggcaagggaactcaaatgggaaataaaggaaccggtaccacaggctccggtctggagggtagtccgacgggaaactcttcggaagggaagtccggcggagtgggcggttacggaacatttgacctcaacggacgttctttgggtagtggcggtttgccgatgcctgtctataatgtgcaggatgagggacgggtggtagtgactattaccgtaaatcccgcaggacaggtgataagtaccagtatcaacaaacgtaccaatacagtaaacgcttcgttgcggaaggcggcggaagaggccgcccgtaaagcacgctttaaccaagtggacggagtgaataaccagacaggtactattacatattactttaaactgaagtagcttatgaaaacaatttatgtatttttggcagaaggcttcgaggaagtggaggcgctgaccccggtagatgtgttgagacgtgcaggtttgcctgtgaagactgtttccgtaacaggtgtgctgaccgtaaacggtgcgcatggtgttccggtagtagccgatatggtgtttgaagaagtaaaagaaggggatgcggagatgattgtattgcctggtggtctgcccggagcgacaaatctggatgctcacgaaggtttgggcaagttgattatgacatttgctgaagccggacgtccgttgtctgccatctgtgccgctccgttggtatatggaaagcgtggtttgttgaaaggtaagaaagtaacttgctatccgggattcgaaaagtatctggaaggtgctgagtatacggccgctttggtagagaaagacggtaattttattaccggtaaaggccccggtgccgctatggcattctcatttgccattgccgagaaatatgtcggtgcggaaaaggtgacagaattgaagcaagggatgatgattgcagaatgaacaggcatgtcattatagttgcaggaggcaaagggttgcgtatgggaggggatattcccaaacagtttttgcctgtagggggtaaacctgtgttgatgcgtaccatagaggctttttacgcttttgattcttctatgcatattatattagttcttccggtgagccagcaggcttactggaaagatctttgtgaaacgtatcattttgctttgcgtcatgatattgccgatgggggcgaaactcgtttccattctgtaaagaatgggttggcatacgtgaagggagaaggcttggtaggtgttcatgatggcgtgcgtccttttgtttcccgggaagtgatagccggatgttatgaggcagcgcagactaagcaagcggttattcctgtaattgatgtggtggaaaccgtgcgtcatcttacgaagccgggaagtgaaacggttccgcgtaatgactataaactggttcagactcctcaggtctttgaagtgcagttgttgaaagaggcatatcaacaggaatatacggatgcctttactgatgatgcttctgtagtggaggcgatgggcagggaggtctgtctggtgcagggaaatagagaaaatattaaattaaccaccccttttgatttgaaaatagcggaagtcttaatttgaaatgttcgatatcactacgcgtgacataaaatatttgcaaggagtaggcccgcagcgtgcaaccgtcttgaacaaggaattgaatcttttttccttgcatgatttgttgtactattttccatataaatatgtagaccgcagccgcctttattatatccatgaaatagacggaaatatgccttatatccagttgaaaggcgaaatcctcagttttgagactttgggtgagggaagacagcgcagacttgtcggtcatttttctgatggtacgggcatcattgatttagtctggtttcaaggaattaaatatctgctagagcattataagaccaggacagagtatattgtctttggtaaaccgaccgtattcaatggccgtatcaatgtggctcatcccgatatggacccttcaggcgaacttaccttatctacgatggggttgcagccttattataacacaacggaaaggatgaagcgcggtttcttgaactctcatgggctggagaagttgatgaagaatgcgcttgccctgctacaggaacctcttgctgaaacattgccccctcggttagtggaggagcatcatttaatgtctttggatgaggccatccgtaatattcatttccccaagaatcccgaattgctgcggaaggcccaatatcgtttgaagtttgaagagctgttctatgtgcagctcaatattctacgttacagtaaagacaggcagcgtaaatatcggggcctgcgttttgaacgggtgggtgagatctttaatactttttattcacagaatcttccttttgaactgaccggagcgcaaaaacgggtgataaaggagataagaaaagatatgggaagcggacggcagatgaaccgtttgctgcaaggtgacgtgggaagtgggaaaacattggtggccttgatgtccatgcttatcgcactggataatggctatcaggcatgtatgatggctcctacagagattcttgccgcccaacattatgaaaccattcggaaattcctgtttggcatggatgtgcgcgtggaacttttaatgggatctgtcaaaggaaagaagcgtgagaagatattgaaggatttgctgacgggggatgttcagattcttataggcacgcatgccgttttggaagatactgtgggcttttcttctttaggaatggtgattatagacgagcaacatcgtttcggagtggctcagcgtgccaagttatggagcaagaatgtttgtccgcctcatgtgctggtcatgacggctacccctattccccgtaccttggctatgacactgtatggtgatcttgatgtatcagttattgacgaattgccgccgggccgtaaacccatccagactatccatcagtttgacaatcgccgtgccagtctttatgcttccattcgcaaacagatagaagaagggcggcaaatctatattgtttatcctttgataaaggagagtgagaaaatggatatcaagaatctggaagaggggtatgaactgatttgtgcggaatttcccgattgccaggtcagcaaggtgcatggtaagatgaaaccggcggagaaggatgctgagatgcagcgttttgtcagtggtgaaacccagattatggtggccactacagtgattgaggtcggggtgaatgtcccgaatgcctcggtgatggtcattgaaaacgccgaacgtttcggactttcacaattgcatcagttgcgtgggcgtgtgggacgtggcgctgatcagtcttattgtattttggtcaccacttacaaactgaccgaagaaactcgcaagcggcttgaaataatggtacagaccaatgatggtttcgagatagcggaagccgatttgaagttgcgcggtcccggtgacttggagggaacccagcagagtggtgtcgcttttgacttgaagatagccgatattgcccgtgacggtcaattattgcaatatgtccgtgatgtggcaaatcgtattgtagatgaagaccctgcaggaactcgtccggaaaatgctattctttggcagcaattgcaagcattgcgtaaaacaaatataaattgggcggctatctcttagtttatgttactgcattgttaaaagcaaggatatatgttgcataacatgtttgtagcgtttcccctttatttatagaggtttctgaacattttatcgaagcattgtatataacttacatacaaaaagagttaaagaagttccttctttctcaaggaaaatctttatctttggaagaatttttggaaaaagcacagtataaaccttaaatgaacccaatattatgatggaaaaaacgctggttattttgaaaccttgcactctgcagaggggcttggtgggtgagattattaatagatttgaaagaaaaggcctgcgtttagccggaatgaaaatggttcagttgacggatgaagtgcttagcgaacattacgctcatttgagttcaaagccgttctttcagcgagtgaaagatgcaatgatggtttgtcctgttattgtatgctgctttgaaggtgtggacgctgtccaagtagtgagaacattaaccggtcctactaacggacgtctggcggctcccggtactatccgtggagattacagcatgagctttcaggagaatatagttcatgcttccgattcgccggaaaccgctgaagtggaacttaaacgattttttaaaccagaagagatattcgagtataagcaagccgtgttcggttccctttatgctaatgacgaatattaaaaagaaaaacctaaaaaaacggatgattttgaaatgtgttaaagtagtcgcagcggcagccttcgccctagttagcctgaatgtgtcaggacaggatctgttggcacgccaggcacctatcgaccgaaaattgaaagcagtagattctgttgcattgattcgtcagataaaggcggaaaagtcagcttatcctgcatatagtctctaccctaattggagtaacgagcgtgtacacgcttatggtaatactgttactattcctgatacattccgtattgatatgaccggtttccgtatgccgacagaacacacaaaaataacttctaaatttggtccccgtcgtcgtcgtatgcacaatggattggatataaaagtatatataggtgatacgatccgtgcagctttcagtggaaaggtgcgtatggtgaagtatgaacgccgcggatatggaaaatatgtggtgattcgtcacgagaatggattggaaacagtatatggtcacttgtcaaagcagattgtggatgagaaccagtacgtagaagcaggagaacctatcggattgggtggaaacaccggacgttccaccgggtcacatcttcattttgaaacgcgtttcttgggacaggccattaatccggcattgttatttgattttgagaaacaggatattgtagccgattcttatttgttcagaaaaggtaataacagataccagcgtaacaggactaatagtaagaatgtgaatttgcttgcttcatcagatggtactatccgttaccataaggtaagaagtggggatacattgagccgcattgcacagaaaacaggtacatctattgatgctttatgcaagttgaaccacattacccgcagaactattcttcgtccgggacaagtgttaagatgttcttaagctttagttaattaagaaatataaaatagggcgggaaagagtattcttttccgcctttttgtttacgcttaagcagaaaaatgcgtaactttgccgcctaatcatagagtgtgatgaaagatacgaaacaacaatttgaacatgtgatagctatttgccgtgatttgtttgcgaaaaaactgcacgattacggtgcagcatggcgtatcatgcgcccttcatctgttaccgatcagatatttatcaaggcaaaccgtattcgtagcattgaaaccaaaggggtggcgatggtggatgaaggtatccgttcggagtttatcgctattgtaaattatggaataatcggcttggtccaattggaactgggatatgctgaaacggatgacatgactgaagagcgtgctttggaattgtatgaccggtatgccaaacaggctttggaactgatgttggccaaaaatcatgattatgacgaagcgtggcgcagcatgcgtgtcagttcgtatactgatttgattttgatgaaaatctatcgtaccaagcagattgaaggtcacgatggagctacattggtatcagagggcattgatgccaactatatggatatgattaattattctgtattcggattgatcaagttggaatttggagagtaaacagttacatagtatcattggaatctggacaaacgcctgccgttttttgctggcggcagtatttatattttccggttttgtcaaagcggtagatccgctgggtatccaatataaaattcaggattatttggaggttttcggttgggttgcttcggtgcctgcctttcttccgtttctggcgtctgtattgcaggcaatggtcgagttttgtttaggagtatatcttttgtttggtatccgcaggagaatgaccaccttgtttgttgtgcttatcatgggggtgatgactccgctcaccttatggttggctctttccaatccgatatcggattgtggatgtttcggtgatgctgtgactttgactaattgggaaacttttgggaagaatgtacttttgttgatagcggcggtgtccgtttttaaatggggaaaccgtataactcctttggtgaccaagcgtttcgattggttggtggctatgtatacgtttctctatatttcggggatgactttgtattgttaccgtgagttgcctgtctttgatttccgcccttatcatatcggggcagatatacgtaaagggatggaaattccggaaggagagaagcctactgtttatgagacccgttttattcttcaaaaagatggagtggagaaagagtttacattagaaaattatcccgatagcacatggacttttgtggattccaaaacgatggtgaaggaacaaggatacgaaccgcctattcatgacttttccattattcgtcaagaagacggggaagatataaccgatgaagtactggatgatgataattatacctttctgttggtggcgcatcagctgagccaggcggatgatagtaccattgacctgataaatgaactgtatgattatagtgtggagcatggatatcaattctattgtcttacctcatcacccgatagtgatattgaagactggcaggagcgtacgggagccgagtatcctttctgcctgatggatgacattacactgaaaaccatgatacgctctaatcccggactgatgttgctgaagaacggagtggttataaacaagtggagtgtgaatagtctgcccgatgaatatgtgctgaccgacaggctggaaaaactgcctttggcacaaatcaatgaaaagactttcagtcataaagtggtgctggtattggcatggtttgtctttccgttgttgtttttcagcatggtggatgtcatttgggagcattttcataggaaaaagaaattgaaagagaatcgaacaaaataatttcattaaccctttaataaaacaaacaaaatgagaaaaaacattgttgcaggaaactggaaaatgaacaagaaccttcaggaaggtattgctctggcaaaagaattgaatgaagctttggctgctgacaaacctaattgtgatgtggtaatctgtactccgtttattcacttggcttctgttactcctattgttgacaaggctgtaattggtgtaggtgcagaaaactgtgcagataaagtatcaggtgcatataccggtgaggtttctgctgaaatggtagcttctacaggtgctgaatatgtaattctgggtcactcggaacgtcgtgcttactatcacgaaactgtggaaatcctggaagaaaaagttaaattggctttggctaataacttgaagcctatcttctgcatcggtgaggtattggaagagcgtgaagctaacaaacaaaatgaagtagttgctgctcagttggcatcggtattctctttgtctgccgaagattttagtaagattatcttggcttacgaaccggtttgggctattggtacaggtaagactgctactgctgaacaggctcaggaaatccacgcgtttatccgttctttgattgccgacaagtatggtaaagaagttgctgataatacttcaatcctttatggtggaagctgcaagccttctaatgctaaagaattgtttgctaaccctgacgtagacggtggcttgattggtggtgctgctttgaaagttgttgacttcaaaggcattatcgatgcattcaaataattaatttcatcacagattactcaagcttacacagataaagaatcataaaatcgtctgtggaaatctgagtaatctgtgatgatttacttaaattcataaaacgacatgagatacatttttatcctactctttttgagtctcggactttccgctttggcacagcagaacatagtagaaagcttgcagcgtaaccgtgccggagaaggtactgtaaccatccgtcaagatcctaaaataacaggcttgattggtagtatctatacaggaaatgttacgggaggtgagcagaaaatgttgaaagccagagggtatcgggttcaggtctatgcaggaaacaattcgcgggtggctcgtaatgaagctaataatgtggctgccaaggtgaaagaggagtttcccgatatgcctgtctatgcctatttccagcctcctcgttggctgtgtcgtgtaggtgatttccgcagtattgaggaagcggatgccgccatgcgccgtctgaaggctaccggtgtttttaaagaagtatctattgttcgtgaacaaattaatattcccctggactaataacatggaagaactattgcatcccgaatggtcagcagagaaaattgaacagttgaaaggccattatcagagtattttatccctattgggtgaagatgtagaaagagaaggattgctgaaaactcctgagcgcgtagccaaagctatgctgacattgacacgcggttatgaacaagatccgcatgccattttgttgggagctaaattcaaagaagagtatagtcagatggttatcgtgaaagatattgatttcttctctttgtgcgaacaccatatgcttccgttttatggaaaggcacatgttgcttatattcccaatggttatatcaccggtttgagtaagattgcccgggtagtggatgtgttttctcatcggttgcaggtacaggaacgtatgacactgcaaataaaagaatgtattcaggaaaccttgaatccgctgggagtgatggtagtggtcgaagccaagcacatgtgcatgcagatgcgcggggtagagaaacaaaatgccattactactacttctgatttcactggtgcgtttaaccaggctaaaacacgtgaggaatttatgaatttgatacggcataaccgataaggagttatgcctttattttagtactacccggtcgccggcacgcttggccataattttttgtaattcacttaattctttaaagtgggccataacttcaaggcatttatcggcattggctactacttcaggtttgttcaatgcttgcagcgtatatttcatatcctcttctaatatggcaagtttgaagtcgataagttggtgcggtaccaattcgtgtaagcgttcttcatctttaaccatcgcttgtgaattgcttttactcagttggtaacgatcatttatcatatctgccgccagcttgctgattgtaggatcgggatgagccagaaaataacgctctgccgtgaagttggggtcatgcagatgagcttctgcttctgccagtattttccggtgcaacggattatggaactgtaattcatcctgtttcaaatccatagaaatatattctatcacagtaagaggagtttccgtattttcttccgtttctacatagcacatgactttctctccgtggcgtatcaaagtttgaagcagtaactgctcttttacataaaaaacgtacttttcccgtccttcttggggaatatacgattgatatcccgcttctgcttctgcaggaggaaacggagggggaacattatcatccacgcctagggggggcatatcggcaggaggtatgctgccggcaggaaaaggagtatccgctggaggcagagagctggtagtggcggatgcgtctttttctttcttgatttgttccagatagttatcatcccgttgaagcagatgctttttgatctcgtctaaaataatttgctcgtttacgttcaaaagggtagcacattctgtcaagcaggtatatcgaattactttatccggaatcagtccgatacttcgtgccatgtccgatatcaatccggcccgtttgatggggtccctttgtgcgtcttttagtaaaaggttggtcttgaaacggataaagttctcttcgtgatcatcaatgtattttctgaattccgtggcattgtgttttctggaaaaactatcgggatcatctccgtcaggcagaagcagcactttgatattcatgccttctgcaagtaacatatcgatgcctcggatacttgcttttataccggcttcgtcaccatcatataataaggtgatattggaggtgaagcggtgtagcaaccggatttgttgttcgctcaatgctgtacccgagttggccaccacattctccagcccgcactggtgcatggcaattacatcggtgtatccttctaccatgtaaacacagtcggcttttacaatggcagctttagcctgataaatgccatatagttcttttcgtttactgaagatttcggattcgggcgaattgacgtatttttggtttactcccttggtacggctgtccagtacacgtccgccgaagccaagcacttttccgctgatgttaaaccatggaaatatcacacgtccccaaaaacggtcgcgtaaactgccatcttctttttcgtagcatagtccggtcttgagtaaaaattcttttttatatccttttcgcatggcttcttgtgccaatgcgtcaggagcggtagtgctgtatcccaattggaatttcttgacaatatcgtcacggatgccccgttggcggaaataagacatggcaatggcttttccgtcagcgtgattgtagaggatattctgaaaataatcgcgggcaaactcattgacaacaaagagactttcccgtatattttgtacttgtttctcctcatcggtcaattcgcgttcctttatttctatattgtatttctttgccagccagcgtagtgcttcgggataggtcatctgctcgtgttccataacgaaatggacagcatttccacctttgccacaggcgaagcatttgcataatcctttggccggtgatacatagaatgaaggggttttgtcatcatggaatggacaaagtccgacaaaattcacaccgcgtttccgcagagtgacaaactcggataccacatctacaatttgtgcggcatccagtatccggtctatggtgggttggtctatcattgcgagtgcgaagatacaaaaaaaacatcgccaagggtgaacccggcgatgtttttaacggaatattgtaatcagaattatttaatataaggattcagtttgttccattcggaaactggaggaagtactcccatagcaatcacttcatcacgcaaagcacaaagatgtgcataacttttttctaatgcggcttcttcttcgggcgtgcctttcacttcttttaagtggcagccatccttggtgatggaagtttcccaggccatcatgatatggtcgaatttaccattggatacgtaagttcctgcaggccagcggaatggttttcctcccatagcggcggcaatcatttcgatagaaacataggacgggctttggaaagaagagcggccgcgcaggttgatgatgtttgcaccgcctttagttactttttgttgtatttcggtccattgttcttttgtcaaagcatcagtgccgatgatatcaagtaatgcttttccgtttactttagcggtagaagcataaacagccatctgctcaccatgaccgccatatgtgcggcagttttctacgttatccatagcgatgccgaaatgcttggacaattcgctgcgcaagcgtgtagagtcaagagcggcaagggttgtaacttgtgatggtttcaaacctgaatataataaggtgatcagaccggtgatatcagccggattgaaaataaccacgatatgttttacgtccggacagtaggcctttacattttttccgaattcttcagcgatggctgcgtttcctttcagcaagtcttcacgggtcatgccggctttacgtgccgcaccacctgagtttacaatatatttagcatcggtcaaagcttccttgatatcggaagtgaatgtgatgttcatgccttcgaaaccgcaatggtatagttcttctgccacaccttccaggccgggagcgtatgggtcatacaaacaaatattgggagtaagacccatcatgatagcagtttgagccatgttcgatccaatcattccggcagcgcctacgattgtcagcttttcattcgttacaaattccataattctattatttaaagtttgtataatataaacacttttgtgggagaggatgttctctcttccgggtacaaatttacaaaaccttttattatggtgtttattctaaaaaattatatgggataatagaaagttatcccatataatcatcttgggatggtaagttccagaatacttgtcaatcaagatgttaaacagtatttattcaaacaggtttgtggatgtgacaaataatgatatgatctgttatgtatttatgtttatatagctttttaatgcgtctacatattcttcaaaagcttcaagcccttttggtgtaatcttacaaatggtacaaggcatttttcccttgaaagtcttgatgacttctacatagccagccttgttcagcttgtctatttgcacactcagattacctgccgtcgctcctgtctgttgtttcagatagctgaactcggcctcttccactgaaaccagtatggacatcacggcaagtctcagttcggaatgtagtaatggattcaattctttgaacataggcgcaaagttacgattttttttgtttacgggcagcatgattcaatacatgtcccggaataaccatcatgaaaataaagacaggagcgaagattaatatctggtttggacctggataaaaaaggcatccgatggagcttaacgctcccagtgtgccgcaaatagtgacagttttataacctaccaccagtcctgttagtgtagtccccatgcccatcagcagaaggattatgaacaggatgggaagttgccagaaaaacatggcgagcatggatatcagaaagccggttatgccgaataccaaccaaatataattgattactttgtccaaatgagtcttgatacccggctgctgattacgtgtagagaggtaagttcctgttcctgcgatgatagggagtaagaaccataggtattgccaataataatttccggtagttactaccagaaaccagaccagcaggctgacaaagagggtggtatatccccaaaagaggaatggcatgccacaattggtttctagcctgttttttgtattctgaatcatttgagcgatgagttccaaactctctttctcattcaattttctttcttccatactgttttttctttttagtttgtgattgattaatatttgatgcttttttctatggctgtcatcagcaagctgattccccagcctgctatcacccatagtacccaccagtagtgtggactggtaaaccagtttatagctataagaaacaggtttattaccacataatagactaatgaccaagtgagccaattccaaaaatgacgggcactttgccggcatgctgcttcgatttgttcctgggttggaactgtcttttcgttgttttggtttgttttcataggctttatttcttacttatggtgatataaagttagtggtctgtgctatactttcagtagcaaatctcggaatagctagtgtggcgcatgccaggatagtggcacgcttcttgtaaaatattgtgtttgttttcattgttatgatgttttataggttgaatgacaaaagtttattttgcttaaatactttacaaatgtaatatagtttataatataaaccaaattattatagaacttttttcaaataataattatcaagtgtatatgtgcggtagagggggaggtgcaaaatatgtagtcttctttatgaattttacattcagactctggttggcgcgtacttgaataaggacattcttctctgctttttctttcctggagtttttcagcagtggcaatagtttttgaaaactcacttgtgtgttgtgtatatcgtactgcgtttttcgtagctgttttcctgtccattccttgccctgccctggcttgcggtgtccgattgtccttcgggcttgcttcttttccgtcttttcttgttttccgtctgctgttttcgtatgggttccttcctttttccgtccttatacgcgcgtgcgaatattataatgtgtctgtctttttcctcccgtgtcctccgttataaaaacatgctttgtaacacatctgttattcagagtattacaaaaaagtttcaggaaatccgtataatttttccttcttatgtttgctggttatcgttaaaaggtctacctttgcatccgcaatcgagagagatgcggcacttcagacagtgtgtgactgacttggtgaaacaaacgtaggagagttttccttgacagtgtctgcacccagtatcttaccttagcggggctaagggagcgagaacggataagacgtggggaggatggacgtcccgccttttatggaagtttcgaaaaaaaactttttcaaaaaaactttcgaaaatatttggtggttacgataaaatctcttacctttgcatccgctttcggaaacgatggcaagacataaatgagagttctttgaaagatttaagataaacaaacaagtagtacaagccggtgcaccgtatgtaatatatatatggtgtacggaaaaaacaagaaccgtcaatattgatattgatagatttggaatccttgagcagattatcaactgaacagttggaaaaagatattattacaatgaagagtttgatcctggctcaggatgaacgctagctacaggcttaacacatgcaagtcgaggggcagcatggtcttagcttgctaaggccgatggcgaccggcgcacgggtgagtaacacgtatccaacctgccgtctactcttggacagccttctgaaaggaagattaatacaagatggcatcatgagtccgcatgttcacatgattaaaggtattccggtagacgatggggatgcgttccattagatagtaggcggggtaacggcccacctagtcttcgatggataggggttctgagaggaaggtcccccacattggaactgagacacggtccaaactcctacgggaggcagcagtgaggaatattggtcaatgggcgagagcctgaaccagccaagtagcgtgaaggatgactgccctatgggttgtaaacttcttttataaaggaataaagtcgggtatggatacccgtttgcatgtactttatgaataaggatcggctaactccgtgccagcagccgcggtaatacggaggatccgagcgttatccggatttattgggtttaaagggagcgtagatggatgtttaagtcagttgtgaaagtttgcggctcaaccgtaaaattgcagttgatactggatatcttgagtgcagttgaggcaggcggaattcgtggtgtagcggtgaaatgcttagatatcacgaagaactccgattgcgaaggcagcctgctaagctgcaactgacattgaggctcgaaagtgtgggtatcaaacaggattagataccctggtagtccacacggtaaacgatgaatactcgctgtttgcgatatactgcaagcggccaagcgaaagcgttaagtattccacctggggagtacgccggcaacggtgaaactcaaaggaattgacgggggcccgcacaagcggaggaacatgtggtttaattcgatgatacgcgaggaaccttacccgggcttaaattgcagatgaattacggtgaaagccgtaagccgcaaggcatctgtgaaggtgctgcatggttgtcgtcagctcgtgccgtgaggtgtcggcttaagtgccataacgagcgcaacccttgttgtcagttactaacaggttccgctgaggactctgacaagactgccatcgtaagatgtgaggaaggtggggatgacgtcaaatcagcacggcccttacgtccggggctacacacgtgttacaatggggggtacagagggccgctaccacgcgagtggatgccaatccccaaaacctctctcagttcggactggagtctgcaacccgactccacgaagctggattcgctagtaatcgcgcatcagccacggcgcggtgaatacgttcccgggccttgtacacaccgcccgtcaagccatgggagccgggggtacctgaagtgcgtaaccgcgaggagcgccctagggtaaaactggtgactggggctaagtcgtaacaaggtagccgtaccggaaggtgcggctggaacacctcctttctggagaggacgaaagatcgataaggtttttgttcttgtactgctggtgttgtttattcaagatatgattccgtaatgatacggaagagagaaagtaagaagccgggtctaattaaacagactaggttgaacttagtcctatagctcagttggttagagcgctacactgataatgtagaggtcggcagttcaactctgcctgggactacgaacggaatcaagttcgggggattagctcagctggctagagcatctgccttgcacgcagagggtcaacggttcgaatccgttattctccactccatcggaaacgtaagaaacgaagatgaacgatctatgacatattgtacaagcaaacagtaattttagtagtaaagagctgaaagtatatatcatcccgccggcacgcaagtgtgggcgaatggataaggaaagtaaagaagggcgcatggcggatgccttggctctcggaggcgatgaaggacgtgataagctgcgataagctttggggaggtgcaaatgacctttgatccagagatttccgaatgggacaacccaatatcttgaagaggtattatcttactatgtaagaggctaacgcagggaactgaaacatcttagtacctgcaggaaaagaaaataaacaatgattcccccagtagtggcgagcgaacggggaacagcccaaaccatccatgttacggcatgggtggggttgtaggactacgccgttgcatgaagacatcagagaagaactttctggaaagaaagaccatagagcatgacagttgcgtattcgaatgttgtcgaagcatagtagtatcctgagtagcgcggagcacgaggaattctgcgtgaatctgccgggaccatccggtaaggctaaatactcccgagagaccgatagcgaaccagtaccgtgagggaaaggtgaaaagcacttcgaacagaagagtgaaatagttcctgaaaccgtgcgcctacaagcggtcggagctcgttaatgagtgacggcgtgccttttgcataatgaacctacgagttgcctttgccggcaaggttaagtgtgacgacacacgtatccgaagcgaaagcgagtctgaagagggcgtatagtcggcagtggcagacgcgaaaccaagtgatctacccttggccaggttgaaggctgggtaacaccagctggaggaccgcaccaataagcgttgaaaagcttctggatgagctgagggtaggggtgaaaggctaatcaaacttggagatagctcgtactccccgaaatgcatttaggtgcagccttgcgggttactgatgtgaggtagagcgactgataagatgcgagggcttcaccgcctatcaagtcttgacaaactccgaatgcgcatcagttctaccgcaggagtgagggcatgggtgctaaggtccgtgcccgagaggagaagaatccggaccacctgctaaggtcccgaaatgacagctaagttaaactaacgaagtctgactgctaagacagctaggatgttggcttggaagcagccattcatttaaagagtgcgtaacagctcactagtcgaggagtcgggcgtggataataatcgggtatgaagttgtctaccgaagcagtgggatcattaatatgatcggtaggggagcattccagtcggcgtcgaaggcgtaccgtgaggtattctggagcgtctggaaaagcaaatgtaggtataagtaacgataaagggggcgggaaaccccctcgccgaaagactaaggtttcctgatcaacgctaatcggatcagggtcagtcgggtcctaaggctcagccgaacggcgatgccgatggcagaaacggttaatattccgttactaccttcaggagtgacgtggagacgcagtagtgacagtgccgccatctgacggaatagatggttgaagggtgtaggagtcgatcatggcaggcaaatccaccatgagatccgaacctgacagtatgccgcgtccttcgggacaaggcaatagtgcgcgtaagcatgctgccgagaaaatccgctaaacttaatcctgcaggtacccgtaccgcaaacggacacacgtagtcgggatgaatattctaaggcgcttgagtgattcacggttaaggaactaggcaaactgaccctgtaacttcgggataaagggtccctacccttttatgggagggcgcagagaatcggtccaggcaactgtttaacaaaaacacagggctgtgccaaatcgaaagatccagtatacagcctgacacctgcccggtgctggaaggttaagaggagatgtcatcgataagagaagcgttgaattgaagccccagtaaacggcggccgtaactataacggtcctaaggtagcgaaattccttgtcgggtaagttccgacctgcacgaatggtgtaatgatctggacgctgtctcaaccgtgagctcagtgaaattgtagtatcggtgaagatgccgattacccgcgatgggacgaaaagaccccgtgaacctttactatagcttatcattgaatctgggcacgtgatgtgtaggataggtcggaggctttgaagcaggtacgccagtatttgtggagccgctgttgaaatacgaccctttatttgtttggattctaacccgtggaacggggacattgattggtgggtagtttgactggggtggtcgcctccaaaagcgtaacggaggcttctaaaggtgccctccggccgattggtaaccggccttagagtgtaatggcataagggcgcttgactgggagactgacaagtcgatcaggtaggaaactagagcatagtgatccggtgtttccgtatggaagggacatcgctcaaaggataaaaggtactccggggataacaggctgatccctcccaagagctcatatcgacggagtggtttggcacctcgatgtcggctcgtcacatcctggggctggagaaggtcccaagggttgggctgttcgcccattaaagtggcacgcgagctgggttcagaacgtcgtgagacagttcggtctctatctatcgtgggcgcatgaaatttgcgtggctctgacactagtacgagaggaccgtgttggacagacctctggtttgccggttgtgccgccaggtgcattgccgggtatctaagtctggatcggataagtgctgaaagcatctaagtacgaagccggccacaagattagatttctcagggtcgttgtagactacgacgttgataggatgcaggtgtaaagatggagacatcaaagccgagcattactaattgcccgtccactttccttatatgtcggatggtgtatacctttggtttttactacagaatgaaattacgataacagctcaacaatatgtcaaccttattcaggtggctatagcgtgagggttccacctcttcccattccgaacagagaagttaagcctcaccacgccgatggtactgcgtcacagtgggagagtaggtagccgccgttttgattgaagcctccggacttgaagaagttccggaggctttttttttgtatacgcacgcatgaaatgtggcctctaccgttttttcggctcagtttgaaaacttgggggaattagttaaaaaccttatctttcccgtgggtgtggatacctttcccacggaactgtccggaaggctccgccatgtcttttttccggcaggggcaggtccggaaaccctcaccgggtacttatgccttggaatagggactggaaatagaacaggcaggtctgaaggcctgccctgatagagaaccgggagatgataatagagcctttatgcaagctgcatgagccgaaaaaggatagtggagtataaagggaagaagtgtacaatgaaaatcactgatatgagatatgaaaggcaaacacacttcaaaaaaacgctaaattatgcgctaaaaataatatatgtctaatttatatttgaaaaatacgcacttatattatacatattggaatattattcgtatctttgtcgcccgatttatatagtattgctttgggaaagtttgataaatataagattgaattgaagaatatgaaagcggactctgctaagtatgagtttacgctggataatcaattctttgtagatctggatggaccggaagtacagaaagggaaactggcagtagaactgaatgtgaaaaagacatccggtgtttttctgttggattttcaaactgaaggctttgtcattgtaccgtgtgaccgttgcttggatgaaatggaattacctgtttcaacttcagataaactgaaagtaaagttaggttcttcatttgcggaagagggcgatatagttgtagtacctgaagaagatgggtatattaacatcgcatggtttttgtatgagtttatagccttgaatattcccatgaagcatgtacatgcgcctgggaaatgcaacaaaggcatggttggcaagctgagtaagcatttgcgcatttcggcggatgatgaagatgatgatgacatagcggtggagttacccgaaggagatatcagcgaagggccccaggaaatagatccgagatggaatgaattaaagaaaatattagataataattaaagtttagaaaaatggcacatcctaaaagaagacaatcaaaaacgagaactgcaaagagaagaactcatgataaagcagttgctcctactttagctatctgtcctaactgcggcgaatggcatgtttaccacactgtatgtggagcttgcggttattatagaggtaagttagcaatcgaaaaagaagctgctgtttaatcagtagctttaaacacgtttgtacgttttataaaataaagccggcgagcttcggctctgtcggctacttttttgtaagggtataaactaattaaattggaatgatggaaaaaataaatgcagtaataacaggagtcggtggatatgtaccagattatgtcttgactaacgaagagatttcaagaatggtagataccaatgatgaatggattatgactcgaatcggagttaaagaaagacgtattctgaatgaagaaggattaggtacatcgtatatggcgcgtaaggctgccaaacaactgatgcagaaaacagcttctaatccggatgacattgatgcagtaatcgtagcaactactactcctgactatcatttcccttccactgcttctatcctgtgtgataagctgggattgaaaaatgcatttgcatttgatttgcaggctgcctgctgcggctttttgtatttaatggaaactgctgcttcacttatcgcatcgggaagacataaaaagattattattgtcggtgcagataagatgtcatctatggtaaactaccaggatcgtgcaacttgccctatctttggtgatggtgcagcagcatgtatggtggaagctactacagaagattatggtattatggattctattcttcgtacagatggtaagggacttccttttcttcacatgaaagccggtggttctgtatgtcctccttcttatttcactgttgatcataagatgcattatctttatcaggaaggaagaacagtatttaaatatgctgtttccaatatgtcggatattacagcgactattgccgaaaagaatggtttgaataaagataatatcgactgggtaattcctcatcaggctaatctgcgtattattgatgcggtagcctctcgcttggaagttcccttggaaaaggtaatgattaatattcagcgatatggtaataccagtggtgctacacttccgttgtgtctttgggattacgaaaagcagctgaagaaaggagataacctgatatttacagctttcggcgcaggttttacctatggagccgtttatgtgaaatggggttacgatggtagtaagagataataatcattaaactacaaatacaaatgaacgcatccgtattccgatgcgtttttttgtctgtaaccaataaaatgaaagaattatgcataaggcaggatttgtaaacatagtaggaaaccccaacgtaggcaagtcgacactgatgaatttgctggtgggggaacgtatttctattgcaacgttcaagtcgcagacaactcgtcatcgtatcatgggaatcttgaatacggacgatatgcagattgtattctcggacactccgggagtagtgaagccaaactacaagttacaggaatctatgttgaacttctcagagtcggcattggtggacgcggatatattgctgtatgtgacagatgtggtggagaaaacggataaaaatgcggactttatagaaaaagtccgtaatgtcaaggttcctgtcttattgttaattaataaaatagatttgaccaatcaggaagacttggtcaagttggtggaagcgtggcacgaacagcttcctcaagctgaaattattccgatttccgctacttctaaattcaatgtggatacggtaatgaagcgtatcaaggaattgctgcccgattcacccccctatttcggtaaggatcagtggacagacaaaccggcgcgtttctttgtcaccgagattatccgcgagaagattttgctttattatgataaggagattccttattctgtagaagtggtagtggagcaatttaaggaagatgctaagagtatccatatcaatgctgtgatttatgtggaacgtgaatcgcaaaaaggtattattataggtaagcagggcagggcattgaagaaggtggctacagaggctcgtaaaacgttggaacattttttccaaaagtctatttatctggaaacctttgtgaaagttgataaggattggagaagctcggacaaagaattaaagaactttgggtatcaaatggattaaaatcgactgtgatagccgtaaacaagaaagaaaatgggaaatttagtagcaatcgtaggacgccccaatgtgggaaagtctacactttttaatcgtctgaccaaaactcgtcaggcaattgtaaacgagcaggcaggaactacccgcgaccgtcagtatggcaagtcggaatgggtgggacatgagttttctgtcgttgataccggtggatgggtagtaaactcggatgatgtttttgaggaagagatccgtaaacaggtaagtcttgccatagatgaagcggatgtaatcttgtttgttgtggatgtagtgaacggggttaccgatttggatatggctgtagcctctattttgcggcgtacaaagaaacctgttattatggtagctaacaagactgataataatgaactgcaatataatgctgccgaattttataaattggggctgggtgatccctattgtatttctgcattaagcggaagcggtacaggggaattgttggatctggtggtaggtaaattcagtaaagagggtgaagaactgctggatgaggatatccctcgttttgcagtagtaggacgtccgaatgccggaaaatcttctatcatcaatgcctttatcggggaggaccgtaatattgtaacagagattgcaggtactacccgcgattctatttatacccgttatgaaaagtttggttttgacttttatctggtagatactgcgggtatccgtaagaagaataaggtaagcgaggatttggaatattattctgtcattcgctctatccgttctattgagaattcggatgtgtgtattcttatgctggatgccacccgcggcattgaaggacaggatttgaatatcttctctctcattcaacgtaatcagaaaggtttggtggtagtggtgaacaaatgggacttggtagagaacaagaatgccaaagtgatgaaaacttatgaggaagccattcgttcccgtctggcaccgtttgttgattttcctatcatctttgcttccgctttgacaaaacaacgtattttcaaggtgctggaaactgcaaaagaagtatatcaggcacgtactacccgtattccgacagctcgtctgaatgaagaaatgcttccgttgatcgaggcttatccgcctccttcaaataaaggtaagtatatcaagattaaatattgtacgcagttgccaaacacacaggttccttcttttgtgttctttgctaatttgccgcaatacgtgaaagagccttataagcgtttccttgaaaacaagatacgtgagaaatggaatttgtcaggaacgccgataaatatctttatcagacagaaataagaatagtggttaatgattagtgggttaatgggtttcaccgtgatatccgctggttattaaccactaatcattttatcattattttctatgttcttccacttctctcaccttgcggagcagatcagatgcaaagataaaattattcagccgttcattggtagcagtgaacacatcatcttttgttccttcccattccttatgtccttgataaatatagagaatactgtcgccgattcccataacggaattcatatcgtgagtattgataatagtggtcatattatactctgtagttatgtcatgaatcagttcatcaattaccagggaggttttagggtccaggccggaattaggttcatcacaaaacaaatactggggatttaaagctatggcacgtgcaattgctacacgcttttgcataccaccactgatttctcccggatatttgctttgtgcctcaatcaggttcacacggtccaggcagaattgggcgcgttttacgcggtcacgatacgtatcgtttgagaacatatccaatggaaacattacattctctagtacggtaagagagtcgaacaaggcggcactttggaaaatcattcccatttcgcggcgcaatgtctttttttcttttttattcatgttgaggaagttgcgtccgtcatacagaatctcgcctttttcgggagtcagcaaaccgacgatacacttcattaataccgtcttcccggaaccgctctgaccgataatcagattggtcttaccattgttaaaagtagcattgatatccaccaatacgtcttttccctcgaatgatttatataatgatttaacttgtatcatcccattaaaagttgtgttaatactaaatcggaaaatagaatgagtacactgctcattactacagaatctgtactggctttacctactgcaatagaacctccttctaccgtgtaaccgaaataagcagatacactggaaatgatgaaagcgaaaaagatagatttaataaaactgcaccatacaaaccattcctgaaaactatattgcagaccataggccagatcctcggcattcatgactcctccgaaccaacaggtgcaaaaggcaccaataatccccgaggatatgctgaaaataaccaaaaaaggaatcattgtcatcaaagctataattttaggaagaataaggtatccggcggaattgacccccatgatttccaatgcatcaatttgttgggttacacgcatggttcctatttcggaggcaatattagaacctacctttcctgacaggatcaagcacatgatggaggaggagaattccagcaacatgatttcgcgggtggtgtagcctaccacaaaacggggcatccacgggctttcgatgtttaatttgatttgaatggtaattacggcaccaatgaaaaaagaaataagcagtacaataccgatggaatttactcccaactgtaccatctcattgagatattgcttgaaaaacatatgcatacgttccggacgagcaaaagtacgccccatcagcatgatatatttccctacggttgttatgggtcttatcatcatagttttcacaatttcctgcaaaagtagccttttttgtctatataaatgcaaaagaagttctgattttctgttctgttatgcgtttcctaaacttttttagtatttttgtcgcaaaatacatggatatgtcagagcaggaaatagaacaacaaaatacagtgaccgatgacaaccgtatgatacttcgtacagaaaatctggtgaagaaatacggcaagcgtacggtagtaagtcatgtttcttttgatgtgaagcagggagagattgtagggttattgggaccgaatggtgccggtaagactacttcgttttatatgactacgggacttatcgtgccgaatgaggggcatatattcctaaatgatttggatattaccagttatcctgtatataagcgtgctcagaatggcattggatatttagcacaggaggcttcagtttttcgtaagatgagcgtggaggataatattgcctctgtgctggagttgactaatactactccggaatatcaaaaggacaaactggaaagcttgattgccgagttccgtttgcagaaagtacgtaagaatttgggagaccagctttcaggaggcgagcgtcgtcgtacggagattgcgcgttgtctggctatcgaccctaagttcattatgttggatgaaccgtttgcaggagtagatcctattgccgtagaggatatccagcatattgtatggaaattgaaagataaaaatattggtattttaattaccgaccataatgcattggaaacgttgcgcttgaccgaccgtgcgtatctgttgtttgaaggaaaaattctgtttcagggaacccctgaagaactagcggaaaatcctgttgtccgtgagaaatatctaggcactaattttgtgcttcgccgtaaggattttcaattggcggaaaaggacaggcagggaaaaaatgtataaaaccggagatgtgggatataaaaaaagctctgaatttgctcagagctttttttttgattgtatcagataagtaattagtctctaggtcttgcttccttgattaccaattggcgtcccatgaattccgagccgttcagttcattcatggcctgggctgcttctgcgtcattttccatttcaacaaatgcaaatcctttagatttacctgtttcgcggtctttgataacttttacagaagtaacaactccataagccgccattgcttgttccaaatctccttccttaacacggtagttaaggtttccaacatacatgttcatagtgaaaaaataaaaataattaaaataaaaaatactctctgagtggtgattattaatgaagtaggggattcgaacgacagagagtttacgtaagtgctattcgtacaaaagtaaaaccttgtaataaaaatcactagctataattagtatcaccagtcgggcacaaaggaacgcataaattttgaatttgcaagaagaaaaacaacttttttttcttttttttgaatcggtttcttagtcagtcattttaaatggatactttctgctgtcaattagtattttttagtctgtgtatttggttattgaaagattaaacactaattttgcaacctctttggtgaaaaacagaaagaagtaataattaaataaataaagttcagaatgaatatttcattgcaaaacgttgacaaagtgagtgcattgcttactttaaaactggaaaaagctgattatcaggcaagagtagaaaagacactgaagacttaccgtcagaaagctaatattccgggattccgtccgggtatggtgcctatgagtttgattaaaaaacaatttggcaagtctgtccttgtagaagaggttgataaaatgatgcaggaaaaggtaaacgaatatatccgcgacaacaaagtgaatatgctgggtatgccgttgcctaatgaagaaaagatgaaacctatcgatttcgatacgcaagaagattttgaatttgtgttcgacatcgctttggctcctgaatttacagctgaaatctcagctgcggatacagtggattactatactatcgaagtttcagacgaactgatagaacagcaggttaaaatgtatactcagcgtgctgcaaaatatgataaagtagagcagtatgaagacaaagacatgattaaaggtctgttggctgaattggatgaaaatggaaatactaaagaaggcggtattcaggtagaaggtgcggtaatgatgccggcttatatgaagaatgatgagcaaaaggctatatttaacggtgctaaagtaaatgatgtgctggtatttaatcctgctgtagcatttgataataatgaagctgaactttcttctttattgaagataaagaaagaggaagttgccggtgtgaaaggtaacttcagcttccaggtggaagagatcacccgtatggttcccgctgagttgaaccaggaattgttcgacaatgtatttggcgaaggcactgtaagcagtgaggaagaattccgcgctaagatcaaagaaggaattgcaaagcagttcgaatcagatagcgattataaattcttgatcgatgttcgtgaatatttggttaataagattggtaagttggaattccccgatgcgttactgaagcgtatcatgttgctgaataatgaagagaagggtgaagcttttgtcgctgaaaactatgacaagagtatcgaagaactgacttggcatctgattaaagagcaattgctcaagaataatgagattaaagtggaacaagccgatgtgatgaatatggccaaggaagcaactcgcattcagtttgctcaatacggaatgttgaatatccctgaagaagttctagagaactatgcaaaagaaatgttgaagaagcaggaatctgtagaaggtttggtaaaccgtgctgctgaaagcaaactttctgccgcattgaaagctaaggctactttaaaccacaaaacggtttctatggaagaattcaacaaaatgtttgaataataacttagtaagtcgaagtaagtgattgctaaaactttctaaaaaaggggtttttgaccataaattttcgttatagataagagtattggatacgttaaccgtatttttttgtacttttgtttgtttgaaaaatagaggttgaaaacccttttttgttactaataactaaaccattagattatggatgattttagaaaatttgctaccaagcatttggggatgaacagtatggtgctggatgatgtcatcaagtcgcaaggatatctgaatccttacattttggaggagcgtcagttgaatgtgactcagttggatgtgttttcccgactgatgatggacagaattatttttctgggtacacagattgatgattatacagccaatacactccaggcgcagcttttatatttggactcagtagagtctggtaaagatatatctatttatatcaattctcccggaggatctgtttacgccggattaggtatttatgataccatgcagttcattaatagtgatgttgccacgatctgtacaggtatggccgcttcgatggcagccgtgctgttggttgcgggaacagaaggtaaacgttctgcgttgactcattcacgtgtgatgattcatcagccgatgggaggcgcgcaaggacaagcttcggatattgagatcacggcccgtgaaatccaaaagttgaagaaagaactgtataccattattgcagaccactctcatacggattttgacaaagtatgggcagactctgaccgtgactactggatgacagctcaggaagctaaggaatatggtatgattgatgaggtgctgtcacgcaaaccggctgctctataatgtatttatttccattcgataagaataacagtactaaaaacaacccaggtttccgctatcatttcatgcaggcttctttcttaaagacgcattaggaaacttggatatttaaaggaataaacattggaagataataaaacacctagaaacagtagaaggaaatgtagtttctgcggacgttcggaaaatgaagtcggatttctgataaccggaatgaacggctgcatttgtgacagttgctcggagcaggcatatgaaattatgcaggaagccatgcatcaaaaaaaaggtgcaccgggtgagttgaacttgaaggaacttccgaagccaaaggaaatcaaggaatttcttgaccaatacattattggtcaggatgacgccaaacgctatctttccgttgccgtttacaatcattacaagcgtctgctccaaaaagtggataaggatgatatagagattgaaaagtccaatatcattatggtaggtagtacgggaacgggaaaaaccttgctggcacgcactattgccaaattattgcatgtgccgtttaccattgttgacgccaccgtgctgacagaggccggatatgtgggtgaagatattgagagtcttttaacccgtctgcttcaagtagcggattataatgtggcggaagctgaaagaggcatcgtatttattgatgagattgacaagattgcccgtaaaggagataacccctccattactcgtgatgtaagtggtgaaggtgtacaacaaggtctgttgaaactgctggaaggatctatcgtgaatgtgccacctcagggaggacgtaaacaccccgaccagaaaatgattccggtcaatacgaaaaacattctgtttatttgtggtggggcatttgatggtattgaacgcaaaattgcgcaacgtttgaatacgcatgtggtaggttatagcgcggcaaaggacgtggtgaagatagatcgcggcaacttgatgcaatatattgcccctcaggatttgaaatcattcgggctgattcctgaaatcataggccgtctgcccatcttgacttatctgaatccgttggatagaaccgctttgcgcaatatcttgacggaaccgaagaattccattatcaaacagtatgttaaattatttgagatggatggggtcaagctggagtttcaacccgaagtattcgagtatattgtagacaaagctattgagtataagttaggagcacgcggattacgttccattgtggaaacgatcatgatggacgttatgtttgaaattccctctcagaaagcgaaaaagtacgaagtgacacttgattttgcaaaacagcagatgggaaaggcaaatatttcgcgaatgcaaacagcttagtatcaagatataaagggagagagaaagaaaaaatgcaattcttctgaaaaatattacccgaaatattcgtgtaatttgagaacttgtttataactttgttaggcaacaaaagatgtaaaacaagaaatcgggaaaaccgtgaaaaactattgatacaatgacggagaatataaatttaacggacgcattaaaaaagtattttggatttgatactttcaaaggtaatcaggaagcgattatccgtaatctgcttgccggaaatgatacatttgttttgatgcctacgggcggtggtaaatcgttatgctatcagttgccatcccttatcatggatggaacagcaatcgttatatctcctttaattgcattgatgaagaaccaggtggatgccatgcgtaatttcagtgaggaagacggagtagcacactttataaattcgtcattgaacaaatcggctatagaccaggttaaatcggatatcctgagcggcaaaaccaaattgctctacgtagctcccgaatccttgacaaaggaggagaatgtagatttcctgaaaggagtgaagatctcattttatgcggtggatgaagcacactgtatttcggaatgggggcatgacttccgtccggagtaccgtcgcatccgtcctattattaatgaaataggaaaggcgccggtgattgcccttactgctactgcaactccgaaagtgcgtatggatattcaaaaaaatctgggtatgcaggatgcgcaggagttcaagtcctctttcaatcgcccgaacctgtattacgaagtgcgctcgaagacaaataatattgacagggatattatcaagtttatcaaggctaatcctggtaaatcaggtattatctactgtttgagccgtaagaaggtggaagaattggccgaagtgcttcaagctaacggaatcaatgcgcgtgcttatcatgccggcatggattctgctacacgcacagccaatcaagacgggtttctgaaagaggatatagatgtgattgtagctaccatcgcttttggaatgggaattgataagcccgatgtgcgctttgtgatacattatgatattccgaaaagtctggaaggttattatcaggaaacggggagagccggtcgtgacggaggggaaggtcagtgtattacgttctattccaacaaggacttgcagaagctggagaagtttatgcagggaaagcccgtggcagagcaggaaatcggcaaacagttgctgttggaaacagctgcatacgcagagtcttctatatgccgtcgtaaatcattgttacattattttggggaagaatatacagaggagaattgtggaaattgtgataactgtttaaatcctaaaaagcaagtggaggctcaggattcattatgcgctgtgattgaagcaatcatagcagtgaaagaaaactttaaagcagattatataattgatattcttttgggtaaggaaacgtcagaagtacttgctcataaacatgaagaactggaagtattcggttcaggcatgggagaagaagaaaaaatgtggaatgctgtcatccgtcaggctttgatagcgggttatttaagtaaagacgtagagaattacggtctgttgaaggttacccccgaaggacataaattcttgaaaaaaccgaaatccttcaagattgttgaagacaatgattttgaggaagaggaagaagaaactccggttcggggaggtgcctcttgtgcagtagaccccgtgctttactctatgttgaaggatttgcgcaagaagctgtccaagaaactggatgtgccgccgtatgttattttccaggatccttctttggaggcgatggctaccatttatccggtgactttggaagaattgcagaatattccgggcgtaggtgccggaaaggcaaaacgttatggccaggagttctgtgtattgataaagaagcattgtgaggaaaatgaaatagagcgtccggaggatttgcgtgtccgtacggtggccaataaatccaaactgaaggtatccatcattcaggctattgaccggaaggtagccttggacgacattgcagtgtcaaaggggttggagttcggtgaattattggatgaagtggaggctattgtttattcaggaaccaagttgaatattgattactttctggaggaaattatggatgaagaccatttgaacgatatttatgattacttcaaggagtctacaacagacaaaatagatgacgcgatggatgaattgggtgatgactatacggaggatgaaatccggttggtccgcatcaagtttatttctgaaatggcaaattgatgcttctttgattgttttgataattaagaaagccgggcgacagagatgtttgtccggcttttcatatgtttttatagcatattcttgtttagggaaaaaatattccgttatatttgcataaaccttaaattttgtattatgagaaatctaattttatttgttggattattcttatcggtttcttgtgtcaaccggcattccattcatcaggactatttaagagaggctgaggcgtatatggagagacatcctgatagtgctttactttttttacagcaattttctgtcgatgattgcagagacagggagcagaaagcatactacaaccttttgctgacgcaggctttggataaaacgtatcgttctataaccgatgctcctatcacatcggctttggcattctatcggcatagtgaagactcattgaaaaaagcaaaagccttcttctatcaggggaggcaatatagtgaggcgaaagaatatgacgcggctgttcgttgctatctgtgtgcgctgacggctatgaagcaactggatgagcctaaatacaaggccttgtgctattcgcatctaggaaatgccaatttcagacaaggcttgtatgccaagggtttgaggtattataaagatgccgtccgcacttttgaggaaataaaggacagtaccaattatgccatatctttattggatgccggatatagttttttattgctggcaaaacttgatagtgcggaacactataccctgcaaggattacgaatggctgagttgattgattcaaaggaggagaagcagactgctgtccgtaatttgggcattatctattcggagcggaaagaatatcaaaaagccttgggactattattatcggtaaaagataatatagagaaggatgattattcttatttttattctttgtctaacgtatatgtacaacaagaacaatatgattccgctatatattatgcagaatatataatcaagaatgatagcgatttgtatgggcaggccagtgcttatctttctttgtatgaagtggcaaaaaaacgtgaggattggaagaaagctttggcttatagagagaaatatgacctatatgctgacagtatacatgagcatacgcaaacggtgaaactggaagaaatccaggtgaaatacaacaatcaagaacttgcccacgaaaaggaactgcttgccataaacaagcagcgcaatgaatggcggctggtgggtgctatattgcttgtcgttctgctcttgctctacctcctgtcggtctacaagcgtgagagagtgaagaaagagcggcgtattctgttgctgcaacagcagatacaggagaatgaaaacgttttgaccaccttgcagcacgattatatcaagcggaataaagagatagaggacttgtctttccgctatgcgcaaaacaatgaaagtctgtctgtggaaaatgaggtaatgaggcggcatctgctggaattgcaacagaagaataaggaagagaatctcaagttggcggataaaaataagattttgctggacgaactgaagaaatacaaggatataaagaccgagagtggaaggcattatgaaaccgttactttcattattcaacttttagataatcccgatacagctcatgcattaactccaaaggaattggatgctatagagtattttgtcatccgtttgttcggtcccatgtttcaaagccgtgtcgaggctgtgggtctgagtgccaccgaacggaagttgtggtgcttgttacagttgggctttcctcatgcttcaattgccacttttctgtgcataactcctcaatctgtttcaagagccaaactcagaatgaagaaaaagatacaggaatttatggcgaatgatgcggataaactttatttgtgatgtatacttgttgatgttcttgtctatatcagtggtcggaactagatgaattatggcttgtaatatattgatatgcagctgtttgtaaaatatgtatcaagtcactatttgtctattttgctttttttgtggttaattgcattattcctaattttgttgatgtaaaccaaacgaataatgtagctatgaaaaacaaattagtattgtatttattggtaagccttgttgcaagttgtatctatcctgtaactgtatgggctaaggttaatgagagattctctttgaaaaatgaatctgtatcagagcaaataccattaacaaaaaaagttagtagaaaaacaagaagtattcttatccctccttgttcagttgcgttgctggaatcttctttaattttttcctttcattccctatcagaggatgcggaaatcatcctctataatagtgcaaatagtgaaatgttgcgtatccccatatctcgatatcagcgaggtagtgagatgaatatacctattgattatttggaaatggggagctatacattggaaattgttacagcatccggcgaacattggtatggttattttgagtacgtagcatccgatacgctctctttataataaatgctatcttgtatgttcatggatttttggtgcgaaatatacgagtctgtaaaaagaaagccttcacgtactattctgaccggtataggcatatcatgggggatttttatcctgatagtcttggttggaataggttcaggttttgaacggggagtgttcaaactcttcaatggattctctaaaagcacgacttatgtatatgcgtcagaaacatcaatgggatataaaggagcggctagtggaagaaaaatacaatttcaaaaagaagatttgaatatgttgaaatcaagaatacccgagataacccatctgtcgcccgaaacggggcgttggaacgctgtctatgccggcacgaagaatggctggtttgaggtgcgaggggtatatcctgattacttcttgataaaattgttggaggtggagcatggtagaatgttgaatgccttggatatgaatgaagctcgaaaagtggtattgataggtgaaaatgtggtggatatgcttttcagaaaagaaaatcccattggcaagtatatccgtatggggcaggagatgttccgggtgattggaacaataaagaatacgatgcttaattcgtatgaggcaagagtcatttatatgccttactcggtctatgaacaagttgatgccactgccgggcggtttggcacagttgtattctctacagtgaaaggagccaaaataaaggaggtgaatacccatgtgcggaatgtgatggccagaaaatatcaatttgccccaagtgatgataaagtcttttactttaatagcatggaggaacaggtaaaggcatttactgacttgtttgtcatgattcgcaagttcctgtggtttatgggaatcagcactttggtcagtggcgtaataggagtaggcaatatcatgtattcgtcggcaaaggaacgtacccgtgaaataggtatccgcaagtctgtaggtgccaaggcacagcagataaaggctatgtttttatgggaatccatagctcttacttctttagccggatatgtagggttggttttgggatgggggatactgaaggttgtagcacttttcatctcagaagacactccgatgatggaaaaaccgggactggattttccgacagctgttgccgccatatttatcttagtgatagcgggaacattggccgggctgaggccggcgatatatgcggcggaactgaaccctatagaagctctaaaagaagaaaattgaaatgaaagtagtaagaactgttatattatccttgatcctggtattcttggcatttgtcatttaccgggcggcaaagggaggtagaaagatacccgcttctactatccgtgccgagtatcgggatattgagagcaaacttactattccgggggtgatacagccctcaaaagaaatagatataaaatcgactatctccggtgtgttggaaaaattgttggtgcaggttggagatgaagtggtgggaggacagccattggcgcaaatacgatatgtaaaagatccgttggaatacaggcggctattaaaggaattggaaatagcggaaaccaggtatttgactgctgaagctagttttgagaggacggaaaagttatatgtaaaaaagttgatagcgcaagaggtgtatgagggcgagaaaagtaatttggctgttcttctgtccgaatatgaatccgtagaatcggagttggatatgttgaaagggcaatataatcaaaagggaatatccaatattataacggcgactgacgcaggtactatattggagcttccgataaaagagggtgggtctgtgatggcaagaggtacattgaatgaaggaacaaccgtggctagagtggcagatctgcaatcgttagtatttaaaggaaacgtattggaatctgatatattgaaacttgctgtagggatggaactgtcattatcggttcttatggataagaatataactattgacggagcattaagtcttgtcgcccccaagggaattgtgcaggatggagtcgcgcgttttgaaataactgccggtttgtttatacctgaagaatataagcaaatgataaaagccggttgtacggctaatgcagaaatagtggtggagcggaaaaagcacgtgctggctttggaagagaaatattttcagtttaactatgattctgtttttgtagaaatagtagctgataaaagtaaatatgaaaaacggtttctgaaaacaggtatctcggatggaatatatactgagataattgagggagtggatagtacgtccttaataaaaaatataaatgtagaatagtttatgaatggaggtttgatacataacaaaaagtttaatttagtggcatttttgtcaatggggttattcttgctgatagggtttatcgatatcttttcatggatatttattatgcttcctgttgttgtgtgtttttatgtttatgatattagacatggggctgtgtatttgacaagtggggaaatatcttgctttgattacattctgtatacagtatgtgccgtagagttactctgttgcctgacttctgtttatattcctaatagtattactgcgactctgaagattcttttatcaatagcattttacttttttattcgaacttttattcgttttcgtagtcagttcgcttttttgtataaagtactttccatagtagcaggcattttatcattgattacgttattctttttcttgcttcatcgtgatcggttttatagtgtaggttttgagaatcttactgactttaggagccattatcggccttttgggcaattgtccaataattgggctactatgttgttgtgcctagtaccttttcctattatatctatcttggagttgggttatagaaaagagcagatatgctatatctgtatggaaattttaatgttggttgctatattggtcagtttctcacgtggggcatatattgctttattcgtattttttgctatgctgataactttcttttgcatttataaacgtgatatgctgaaaaaggccttggctatttgtttgtgtgtttggttgcccactttgttgtgtatgttaccagaaaggaagtctgttcttattacttgttttatgaatcataccgtttcacagcaacgcagtacggcagggcgttttgttaaatggaaagaagccattaatatattcggactttttccggcaacaggagttggaggtggtaactatgcccttgcttcggatacttatagacaggaaaggcaaggactatttacatcctatgctaccaatacctatttgcaggtcgcggctgaaaaaggcattgtcggagttatagtatatggcgcattggttttgtcgcttatatacattggaatacaccaaatgaaaaaaggagaattgagatcaattgtatttttctctattttgctggcattaggcgtaagggaagttacattctcttctttttttcagaaagagaatatgatgatactttgtttcctgataatggttagtttggttcaaccgttagaagataattatgagttgttcaagtaaacataaaattgctgtacagggcgtgcttggttgcatgattttgctgttgggcttttggcatattcgttattcgtatgctaataagcttaacaataaggcttgtacaatggcggattctgagaaggcgatgcggactatagaaaaagctataaagttaaatcctatgaatcctgtttattatgccaatatgggattgctttatgctgctacggatacggctattaatttacgtaattatatggctttgagtaaagtatcttcagaagcattggataaatctttagcttattttcacttggcaaacaacatggctcctaaaaatcgtttgttcagtcttaatcttggtctattatatgccctaaatgggaaatatttaaaagctaaaagtttctttgaaaaagcagtggaaaattccgatgaggaagaaaatgttttattatgggccttattttgtgagagccataaacaatttgttgaagcaaaaagggcgtttgtgaaagcactaataatagcaccttatttattagagacggatatatatgctaaattagagaaacataattattgttattggatagagatagtggaaaatgtggtgaagatcttgtctgttaggaagggtgatcctataaatatggctaaattaggaagtgtattattatacaagggagataaaattgaagctgaaaaattatttattgaatcattggaagttatgtgtggtttaagccgtccttggtatgctttaggacagttggctgagaataagggagatagtataaaagcttatatattttataaacgaggaatgtctttagatagtccaattactctatctgatagaagaaatttaataaacaagaatgaattgacagaatattcattaaagagcaaagctttagacataattaatatatatgaaaatacatataatacatctttgatagataaaagaattattttaatggatacccttagtatacataaaaaggcggcatccgaaaagccataatagagtaggattttttttaatattattatttatgaaagaactaaatttgaaacagatggaatctgtcaatggtggtctggaaagtgattgcaaaggagcattggtaagtttaggaatgggagttgcaggagttgtgttgtcggctgcttcattaggatctggacctgtaggatgggtttctggattatcttatggattatcattagctggcacatcatttagtggaattcaaacgattggaagttgtttttagtaaaacaaacggtttatgaaaaaacaatatctatttcttatacttgtgatttatttgattgggtgtatcatgaatttatgctattacatagtaatatatggaactttcttttcaatgcagtatatgaatgcaatattacttttagttgtagcaatattgcttatatttaatcagtattacaagaagtaagaaatcatgaatagaaggaagaatcttgaaatctagaattgctttattcttccttttttgctgtgtataaattataaaagataatgaaaagtaatctacttcaatattaccttaactggaatgtaaaatgttatgttttaatcatattgggaatttcttgcctgatagtgtatgtacaacaagaatatattattgttcctcaaatacataatatgttggccgttgatattaaaacgaaggaatggctgctttcaaagtttggtgaataccgttttgcttcttttgtcttgacaccattagtgatacttttgcgtatctatttagttagtatatgtttttatattgggaatatactattagaaagagtccataaaaccactacttggaagacttattttcatgtctctttaaaggcggactttgcattgattttggctccacttctaaattgttgcctgattctgtatgcaggaacggattttgctgcgaacataatgcaaaaaacttctttattatatttttttgatgtagatagtttagatgcatggatggtcattccgataagtctttttaatatatttgaatttttatatttcttgtttgtatcaatgctgttgtctgtagctacaaatcgaacctatcgtgatagcatgaattttgttacttcaacgtattgtacaggattgattttatacattatcattgttgtatttatagtattatgtatagtagaatgaataattatataaaatgcttgcgaacgatgctgctatgttttattgtgatattgtttatatgtgtggttgttggtgtaattaaatattctacagcacattctttgaagcaagaaaaagacattaagttatctacgattgataatgaaaaatttacaatggagaagtattatacagattcaaagccattattaataatttatttccatccagaatgctatttttgtagcatggaaatgtctgaaatgttagaaataaaaaggattgaaaattttaatgcactttttataactaatgcattagaaagtgaagtgcaagatttcttgttacaatatcctatagataaattgaaaaacgccactatagcaatagacattcatggtgaatttgccgaaagattcaaaataaaggcacctcctactattattatatacgacaagaaagggaagcttaaaaaaatatttcgtggagcagtgactataaaaaagatagtaaaatatttatattgagatctgatagatacatggttatgagaatgaaagaactgaataaaacatttgttttacaacatgatgcatccgattgtggcgtagcgtgtttactatctataatacgatattatggtggcagcacaacattgcaatatttgagggagctgagcggtacgacaaaacaaggcactactttgcttgggctttatcaggctgccgggcaagtcggctttgatgcaaaaggttgtgagactgatatactttcattaaaagaacatggaagtcctgtaatccttcatcttgtactagatggaaaatttgagcattatatggtttgttatggttttaaggatggatattttattatgggggatcctgccaaaggaataatcacttataccgcagaagaactggaacaagtatggaaatctcacgcttgtcttactcttgtgtgtacaaacaattttatactacagaaagacattaaagcacagaaaagagcttggctcatccatctattgagagatgattatgccatattgggagtaagtatccttgtaggattactcatgtctgttttggggatgactacagctgttttttctcaaaaattgattgatgtcatcatccctgataaagattataaacgtttatggctgggattagttctggtttcattcttgctgctggcacgattaggtttaggaacgatccgtcagtatatgttgtttctccagagccgtgattttaataatagactgatcgctttcttttataatcatctgttacgtttgcctaaattcttttttgatacgcgcagaataggcgaattagtagcacgtcttaatgatacacgccgcattcaatctgtagtcagtatcattgcaggaagcattgttattgactttttagttactattgtaactttaagtatgttgttttattattcttggcccatagctttattgctggttataagtattccgctatttatttggatagtgagcatatataatgctccgttggttgaggctcagcgtaatgtgatgatgagttatgcgcacagtgaaagtaattttataaatacgatgcagggaatagataccataaagaatttcaatagacaacatgagtttggagcactgaatcaggcaatatatggtttctttcaaaacaaggtgtttgatttaggaaggctgaatataaaattatcggttgtttatggtattattagtattgtactgattgtaggggcgatagggatagggagtttctttgtcttgtccgggcggttgaaattaggggaattgatggctgcgataagtctggtggcatccattgcaccggcaattgttaatttggctttagtgtccgtatcattgaatgaggcaaaagttgcttttaatcggatgtttgagtttgtgggtattccttctgaaaagaaagaaggagatttttccccgggaagggtggatagcattcaagttaagaatatttctttccgttttccaggacggaaaagaattttagacaatatttctcttgcggcttttaaggataaaatgatttttattattggcgaaagcggttgtggtaaatcgacattttgcaagatcatggagagagcatatgagttggagacaggggaaattttattaaatgggaaggatgatttgagggggactgccatagaaaaatggagggagaatataggtgttgttccgcaagatgtttttatttttaatggtacagtgatggataatctgttactcagtggcgtggatacgtctccacaatatattatagatgtttgttcccgctatggagtggacaaatatattgcccgattgcctcaaggttatcatacggttgtgggagaagaggggataaatttatcgggtggtcagaaacaattgatagcttttgcgcgcatcttggttaagaatccctctgtgcttatacttgacgagtcgacttctgctatggatagagatttggaaatgtttgttatggatctgttatcacggctgaaaagagataaaatcatattgttcatatcccataggctacacatattaaaaaaatatgcggattatatttatttgattgagaatggaagggtcagtcattatggtacgcatgaggaaatgatggaaggagagaatatgtatgctgattattggagggcatttatgtgaaatgaagaaactatgctggtctgagcggaggatttatggcaaaagcaaaaatgaagttataaaatagtgttattttaaaaaagaaacgataatgaaagtaaaatgtttattggctgttctgttgctatcggctacagcaacagcattcgcccaagaggcgaagtatggaatcaagtctgccatcctcaagaaagaggcggtcactatggggcagaaagtgcaaggcgtgcagtattttgacgattacggcagaaaggaggcgtccgaacttacaatgaaagtgggaggcgtggcaaatgtggagaaacatatccggacgatagccgatggagataagattatctctattgacctcgatatgaaggtggccaataaagcaactttgcccgtcaagccggtcaactatttgaatctgacagacgaagtacgtgaactgcacaagataaaggaagtgggaacagaagaaatactgggcaggaagtgtaccaagtacactttggaggtagtgtatggaggacaaaccacctattccacggtatggatatggaaaggtattccgctgaagaacgagacttcatccaatggaatggttatcgttaccgagcaggcaacggaaattcaggagaatgcagaagtcccggccatgaagtttttggtacccgaaggagttacgtttccttaatcggatatgaaatgttgaggcttttatcttttctgtttctcgtcagcgcattcttttcttgcttaccggaaaagaccgccttggaacgtgctttgcgtgaggcaggcgataatcggatggagctggaaaaagtgctggcatactatcgggatgatacgttgaaatatcaggcagcttgtttccttattgaaaatatgccggatcaatatgctgtgttaccattggattccacggacacatacgcacgggctttgttgtctttggataaggaggatcccgtcagttgggaaatatcccgttcgcttgtggccgctgtattcgattctatttcaaaaatccaacccgaatcccggattaaaatagtcagggatatagaagtaatgacaagtgactatttaatagagaacatagaatcggcgtttaaggtatggaatcggaggggggtggcaaagcattattcatttgatgatttctgtagttatgtattgccttatcgggtggctcatgaacctctgtctcactggcggaggactgccttgcagcgttatggtcactggctggattcgttgaatgctccgcaggaggtagcccgtagtattgccatgcgttatccggtgcgttataatgcaggcatgaccaaatatccgtatatcatgagttatgaagaaatggacagtttgcaatgggggacttgtgatgacatgaccgctttcctcactttgtccttgcgtgctatcggcatacctgcggcaacggatgtcgtcaaggcgtgggccaacaggagttctgcacattgttggaatgtagtgaaagacactgccggacattttgttgatatcggttacggaccggacgggaagaactttgtggtctataaagtttctaaagtgtatagaatgcagtaccggtctcccggtgaggaagatgtgacacaaggatatgatatgcctttgtccgatgtcagtttcccattggacggtaagaacaaacaggcgtacttgtgtacatttaataatagccagtggataccggtggccttggcaagttcggggaatgggaacgtgactttccggaacctggggaggggacttctttggggagataacaagatagacggttacagggaagaagggaaaggcattgcatatcttccggtcgttcacgaacggggaatattgaaacctttcgccgctccggtcattttatatgaaggaggcgaagtccgctctctccgccctattttatccgatacggaatctgtcaccttacatcgcaaataccccaagtataataaaatagcttctgatgttcacgacagtaatgaggtgatacctggtgatgactatgaacttttctattggaatgacgaatggtgcagtctcggtagaaaaacagccggacacgacacattggtatatgtggaagtacccaagaatgcattgctttggctgcataatcatacgcagggaaaggaagagcggatttttacgtatgaaaacggaaagcagatttggtggtaatatggggtggatagtccggatgaagaaaaaaatgcaggaatttatggcaaatgatacggcacgctctatttgtgatgcgtgtccgttgatgttcttgtctatagatgacgctccgtttgtatgaacttctatttgtaatttattggtatctaattgtttataaaatgtttttttagcctgctatttgtctatcttactttttaggtggttcattgtattattcctaattttaccgatgtcaaactaatgaataatgtagtcatgaaaaccaaattggtattgtatgaatgaaatggatcatagaatatccgattgtgtgttataaaatgaaaagagcaaatgcggaaaaaatggattaaattgtttcctctgttgattggtgcagtcatagcttattgtctgttgtggtatgtgataccgcaaaataaggggggagaagttgctgcaatattagttgctgctattttactgtttttttttattttactgagattcgttatcggaaagaataaaaaaatgtaattggaaactcgcttttataggctgattaataggatattatgtcgtttatgacttctttaatcagcctattgtattgtatgataaataaaaactcaataaaacatttgataattagggactaattgcagacattgcaaatgcacaatccctaatttgattcgaaaatgcagatgcaaatcaagctaatcagacgttttttgtccaaaatcatcgcattctttgagacattataagacttcgcttggtgatacgataatcattaagtatttttgccgcaaatattgcgacgttattcgttgcttaatgacgcataagatatgttcgatgtataaaagaggagaatgtcagataattaaaagcaggcttgaagagccaagaaagttaatgattatccgcaatcataccaccaaatgctaatttatagatgctttcaccgtaggggcggacccgtgtgtccgcctgataacattcactttatgctttcgagcagacacatgggtctgcccctacggtggaagcgtcatccgtaccgagaaatataccggcacataaattcccatttatcatccggtgatatatatgcggataatcatgaaaagttataaggttgagttgattgtatgaatcttaaaaaaaatataattatgaaagaccaagaattatacttccggtatgatacattatacataaccggtgacagatatgagttcaaaaaggtcaagaagcggcctttaggaataaaacttcgcagattctttagtgttaagatagtagtggtagttctttttttagttctctctcctagttttatagaacatcgttttagcatctatcctctttgggtatttgtatgtcctgttgttataatttttagtacgagttgtcatgagatatacaaggatatggtactctggaaggaagatataataagcatgaaggtaaaggatagacgattgattattttgtacaggaatgaaagcggtgacccttccagatacgccaaggaactagaattgcagtcgggcagatatccgttggaagaacttggtgaggcattaggatatgctttacggtagatgtttttccttagcttgacggttgtggggcttgcctgcccgaaccaacggtcacgatcttgggagtaatatgcaacgtagactattttcgggcgagcaaacctcgcccctacaagcaaaataatagctgaatttactttgcacccctgtagctcctttaacaacatggttattgagttagtacaatcccgtggatagtatgcaatcctcatataaaaaagaaaataaactgtcacatccgtcacatctgtcacatggtaacttatacacttgaatcacaacgtgttgcgatggtgacggatagcgtgacggatacggtgacagacttttgttaatcttgcacatatgctacagcctctttttacatgcatgatgtgggttgttccacttgttggaacagtttgttccgtccagtggaacaaatagtttcatgctaatggaacaaattattcctatcagtggaacaacttattcctatatgtaaagacaggttgtaccatgcgctagaattaatggtttctattagaaaaactcattgttccaaatggtgcaatacattgtatcatagcatataatggtctggattatacctgtcgcgaatgcattccttcaatatctttccgcttcacctccctatcggaaattcctgtgcccttcgcgtccttttttttgaaagaaaccttcctgtatattgctttgtttcccgattttatccgtatctttatagattggaaaaaacgaataaatacacgataaatgataaagattacccaggtacgcgacggcggaaaccatgtaacccagagcactcttacactggatgcatgggtagagagaatgaaagaggaagtgaaaacctgtcccgtcaccatgttcagaagccagttgcgccatgtcctccccggcgaccattgcgaggcggcggacaaactgcccaagatgatgcctgccgccgagttccgcaagacggagggcggacagtgcatgaaggcttataacggattggtggaactgaccgtaggccccttggcgggcagggcggaagtggagcaggtgaaacgggaggcatggaagttgccgcagacgcggtgcgcctttatgggcgccagcggacattcggtgaaaatcctggtggctttcacccgacccgacaatacgctgccccttacccgtgcggaggcggaagcgtttcatgctcatgcctacatcatggcggtgaagtgctaccagccccagttgtcattcgatatccgtcccaaggaacctttcctggaacaatattcacgcctttcctatgaccccgatgtgctttaccggccggactccgtgcagttctacctgtcacagcctatggggatgcccgatgaaatggccttgcataccgaacctgctgtctccggccagcgtcctttggaacgtgccttggggagttatgaaacggcagatgcgctctccatgctgttcgaggcggccttgaggcaggcttacattgatttggataagcccgatccggccgatgaaaagtcctcctatagctgggatacccttctttcgcaactggcgttgaactgtttccggtcgggcattccggaggaagcggtggtcagcagggcgcgtttccgtcattttgtacgcaaaccgttggaactggtgcgtcaggtggtgcggaatgtgtacagccggcgtcaggatttcggaagcaaatgcgctttgagccgtgagcagcaattgtcggtcctcattgccgagtttatgaaaagacgttatgaatttcgctttaacgtgcagaccggagaggcggagttccgcgagcggcattccttctgcttccgctttcagccggtggacaagcgtgcgttgaacagcatcgccctggatgcacaggccgaaggtatccccctgtgggacagggatatcagccgctatgtgtattccaatcgtgtgccggtgtataatccgctggaggattttttgttcaaccttccggagtgggacggacgcgaccgcatccgtccgttggcgcagaccgtaccttgtgacaatccgcattggcccgaattgttccatcgctggtttctgaacatggtggctcattggcgggggatggacaagcgctatgccaacagtgtttcgcccctgctggtgggagcgcagggaacgcgcaagtccaccttttgccgcagcatcatgccgccttccgaatgctcctactatacggacagcctcgatttctcacgcaagaaagatgtcgaactaagcctgaatcgattcgcgctgatcaatattgacgagttcgaccaggtgagcgccacacaacagggattcttgaagcacattctgcaaaagccggtggtgaatgcgcgccggccttacggcacatcggtggtggagatgcgccgctatgcttcgttcattgccaccagtaaccacaaggatttgctgaccgatccttcgggcagccgccgcttcatctgcattgaggtgaagggggtgattgatacctcgcgtcccatagactacgatcagttgtatgcacaggccatgcacgagctggcgcacggtgagcgttactggtttaatgatgcggacgagtatgtcatgacggaggcgaaccgcgaatttcagcaatattctcctgaagagcagttccttttccgttatttccgcatggcggaagcgggggaagagggcgagtggatggcgcctgccgaaatattgaagatattgcatcaggaagtggatattccattgaacgccaagagggtggcggcattcggacgaattttgaggaaacagggtattccttcacggcatacacgtaaaggcactgtgtatcagctggtaagggcatgatgagatccggaggcggcggtgtgacagataaaagtccgtcacaccatccgttacaccatctgtcatagtggtaaactattgtcgtacaatgtgttgcatgcggctgtgacagtgtgacggatattaccagttaaattcatttgtgtagtagtcgaatgacggctcttcgctgatgcctctctggcggaacagcatgcgaatggtctgttggtcttgtggcgcaaaagggcgttccttgcggaagcaccggtaatactggcttctgcccaggtggttgatgatcatattgcgcagcaggctgccttctttgtagggcacattgtccagcaggtgggtgactccccatgccatccgcactttgtcggtggaacggaacagttcacattcttcaccctccttgggataacggagcgggtttaccactttgagaaatagatgttcatccgtatcctgcagggcggcagttcgtctcaggcagttttgggaacgggggcatgtggcgttaaggcagcgtgcgaagtctttgggcgcaaagggaaattgcggttgtttttccatgtttcttttgtttcttttgttcaaagtacaaatttaatgaaaaacactggacctgaagaataaaagcgcttcatttgtttcatgaactccctgtttttttgtaattgttttatgtgagccattgggggactgattctttttatttctgcaaaatttcgtattctcttagcaaaaaaatattctatcgttttcccatattgaataaaatgcgtatatttgcacgcaataaaatctaaacgcataaagccctatgtcatttattgcagataaaatcgtaatggacggattaacctacgacgatgtattgttgatccccgcctattctgaagttttaccaaaaacagtcgaactcacgactaagttctcacgcaacatcgagttgaaagtcccttttgtgactgccgctatggatacggttacagaagcgaaaatggccattgccattgcccgtgaagggggaatcggtgtgattcacaaaaacatgtctatcgaagagcaggcacgtcaggtagccatagtgaaacgtgcggaaaacggtatgatttatgatcctgtgactatcaagagaggatctactgtgagagatgcacttgcgttgatgtctgaatatagaatcggcggtatccctgtagtagacgatgaaagatatttggtaggtattgtgacgaaccgtgaccttcgttttgagaaggatatggacaaacgtattgatgaggtaatgacgaaggagaatattgtcactaccaaccagtccactgacatggaggctgcctcacggattctgcaagagcataagattgaaaagttgccggtggtggataaggaaggtaaactggtaggtcttattacttataaagatattacaaaagcgaaagataaaccgatggcttgcaaggatgccaaaggacgtttgcgtgtggctgccggtgtaggggttactgccgatacgctggaccgtatgcaggccttggttgatgccggtgcggatgcaatcgttattgatacggctcatggccactccatgtatgtgatcgaaaaattgaaagaagctaagaaacgtttcccgaatattgatattgtggtaggtaatatcgctacgggcgaagctgccaaaatgttggtggaagccggtgcggatggtgtgaaggtcggtatcggtccgggttctatctgtactacccgtgtggttgccggtgtgggtgttccccagctttctgccgtttatgatgttgccaaggcgctgaaaggtacaggtatacccttgattgctgatggtggcttgcgttattcgggagatgtggtaaaagctttggctgccggcggttatagtgtaatgatcggttcattggttgccggaacggaagagtcaccgggtgatacgattatctttaacggacgtaaattcaaatcttatcgtggaatgggatctttggaagcgatggagaacggctcgaaggatcgttatttccagagcggaactgccgatgtgaagaaactggttccggaaggtattgcagcccgtgtaccttataaaggtactttgtatgaagtgatttaccagctggtaggtggtcttcgtgcgggaatgggatattgtggcgctgctaatatagaacaattgcatgatgccaaattcacccgtattactaacgcaggtgtattggaaagtcatccgcatgatgtggccataaccagcgaggctcctaactacagccgtcctcaataaaatgtatgaatgatgccgcatagaatggtcggtattctgtcacttctccttgtgttcgcgttggaaatgcgggcgcaaggagaagttgtgttatctattgacggtgaacctgtaaaacgttccgagtttgaatattattttcgtaaatcttctcatcggaccccgctttcttttctaccttcttttatcaactataaattaaaagtacgctatgcacatgatatgggaatagatacgttgtctgttttccgcaggcaggtggactggtatcggggcaaacttttaagaacttatttggcagatgcagaaaaggaggaacaggctgcccgccggttatacctgcaaggtgaacaacgtttgcaggcaaatgattggatcaaaattgcccatattagcaaatatttatcccagaatgcaagccgtcaggaggaaatgagggtgcggcagcaaatggattcggtttatgaagcattgcgggaaggcgcggattttgcaacgctggcccgccggtactcggatgatgaagcttgtaaaaatgtgggaggagtgttgccgtggatgcctgtgaacaagaatatgcaggaatggatagacaaactggaatctttggaaagaaataagatttcagctcctttttattcacctatgggcattcatatagtgaaatggatagaccgcaggcagggtgtcagttttgaagaaaaacgggaacagttattgaattatctggagaagaatggcaattgtacatggaaggagctttctgcaggacagaaggaagaactggagttccgggtgcaggaattgcaggatggtttgcttgcggcttatttgtcgcaaaaatatcaatcgggtgatgaagcctggaatgaggatgacctggaacgcttcttcaagcaacataaatcagactatgcctgggaattgccgcattatcggggagcagtgattcattgtaaagatagaaaaacggcttcagctattaagaaacaattgaaaaaaaaaccggtatcccagtggaaagatatattacatacactgactggagatgatgcttcctccaaagttcgtatggaagcaggtgtctttcagatagggaccaacaggtatattgataaattggtctttaaatgcggtagctttcagcctgagccggatttaccttatacttttgtgatgggaaagaagttaaagaaaggtcctgaaagttatgaggatgtaagagaagcggttgtcaaggattatctgactgtctatgaggatgcctggttgaaagatttgaagcggaaatataaggttgaaattaaccaagaggttttaaaaacagttaataataacggaagtaattaattattgcagtatcttcgttcactattttaatgttatatgaatatcgtgaaaaactggggggtgttacttgttatagcaggtgctttgtcgggatgcggccaggagcacgaccataaggggaggactcctttagtggaagttgctggtgaatatctctataaagaagatttgcaggcggcgttgcctttccatatttcaaaagacgatagtgtcttgtttgccgagcactatataaaaaactgggtggaggatgtgctgctttttgataaagcggaaggaaatattcctgataatgcaaagattgccaagttagtggagaactatcgcagggcattgatcatgcatacgtatcaggaggaactggttaatcagaaactggccaatgagataagtgatgaggaaatcagcgcttattatgagaaaaacaaggagttgtttcatacagaacatccttttgtgaaagggctgtttataaaagttcctcttcattctcaggatttggcaagtgtacgcaaatggtataaaaaaaataaccgggatgctattgagagcctggaaaaatacagtttgcgcaatgcggtgagctatgattatttttatgaccgttggatgccattgtccgatattgctgtcaaaatacctttgaaagcgcttgatacggatgagaactatttggacaagaaccggaatatagaggtaaaagacacggcgttttgttatttcctgcatgtagaggaattcttgggtaaggaccaacagaggccgctggattttgcaaagacggaaattaaggagattttaataaacctgaagcgggttgaatttataaataaagtcaaagaagagttataccgacacgcttcggacaggaacaagattaattactattatttgaattcaaatgaataaattgatgtgtaccaaagtttatgcactgatgctgatgctgtttgccgttgtttcagtatacgggcaagacaatgtgatagacgaggttgtatgggtagtaggtgatgaggccattctaaaatcggacgtggagaatgaacgtctgaatgcccagtatgaaggccgcaagtttgacggtgatccgtattgtattattccggagcagcttgccatccagaaattgtttcttcatcaggctgctattgatagtattgaggtttccgaacaggaaattatcagtgatgtggaaagacgtacaaattggctgattgatcagattggttctaaggaaaaagtagaagaatattataataagacttctacacaaatacgcgaaatgctccgcgagaatatacgtgatggaaaaacggtgcagaaaatgcagcagcagattgtgggggatatcaagattactccggccgaagtccgtcgttatttcaaggatcttcctcaagacagtattccttttattcctactcaggtagaagtgcagatcattactatggaacctaagattccgcaggaagaaattgagcgtgtgaagaagactttgcgtgactatacggaacgtgttacttccggtgaaatagctttctccactttggcacgtctgtattcggaagatgaaggttcgcgccgccgtggtggtgaactcggctttatgggcagggctgagctggtacctgaatatgcgaatgtggcattcaatctgcaagatcctaacaaggtatccaagattgtggagtctgaattcggcttccatattatccagttgatcgaaaaacgtggtgaccgtatcaatacccgccatatcttgttaaaaccgaaagtggatgaaaaagatctggaagcagccttgttacgtctggattctattgccaatgatatccgtaatgagaaatttacttttgatgatgccgctacttatatctctcacgataaggacacgcgtaacaaccatggtttgatggcgaatccgcagactggtacggcgcgttttgaaatgcaacaattggcacaggtgtcacaagaggctgcaaagatggtggaaggcatgaatgtgggggaaatttccaaaccttttaccatgattaatgcaaaaggaaaggaaatttgcgctatcgtgaaattgaaaacccgcttgaacgggcataaggcaaccataacggaagactaccaacggctgaaaggcatcgtgatggaaaaacgcagcgaagaaaaacttgataagtggatcagggataaacaaaaacatacctacgtgcgtattaatgagaagtggcagaaatgcgatttcaaatatccgggttgggtaaagaaataatgtagtgtataaagtatatgcttggaaaaagaaagaataaatactcttcgggcaggcataggatacttgtggtaagtgtcctgtgcctgttcggcttttgcttgctggctcaggtgagaccggctaaaaaaggggaacagaaaccggctaaaagcaaggtgtatctgttgcattcggatgtgttgaagaaaagtccgttgaatccggacccggatgcacagattctgattggaaacgttgcgttccgtcacgacagtgtatatatgtattgtgacagtgcctgtttctatgagaaaacgaattcgctggaagcttttgacaatgtgaagatggtgcagggggataccttgtttctgtatggggactatttgttttatgacggaaatacccagattgcccaggtacgctataatgtacgcatggaaaacaagaatacgactttgttgacggatagcctgaactacgatcgtatttataatttgggatattactttgatggcgggacattgatggacgaggagaatgtattgacttcggaatggggggaatatagtccggctaccaaaatatctgtgttcaattatgatgtgaagttggtcaatcctaagtttactttgacttccgatacattacgatacagcacagcaaccaaaatagccaatatccttggtccgtccgatattgtcagtgatgctaaccatatttattcggaattgggcttttataatactcagatagggcaggcggaattgttggaccggtccgtgctgaccaatgaggggaagcgtttgactggagacagtctgttttatgatcgtgtaaaaggatacggggaggcgtttgataatgtgatcatgacagatactgtaaacaagaatatgctgactggtgattattgttattataatgaattgaccaagtatgcttttgctactaaaaaagcggtggcagtggattattcacaaggtgacagcttgtttatgcatgccgatacattgcaaatgtatacctactatttgaatactgattctatgttccgggaaacgcgggcgtatcataaagtacgtatgtatcgcacggatgtgcagggggtatgcgattcgttggtcttttcctccaaggatagctgcctgaccatgtattatgaccctatactgtggaataacaaccagcagttgctgggagagaaaatcatgatttatatgaatgacagtacgatagactgggcacatattcagaatcaggctttgtctgtagaacaactggattctactagttataatcaggtgacaggaaaagagatgaaggcttggtttcaaggcggtgagatgcgcaaagtagatgtgatcggttcggttcgtctggtatattatccgatggaaagcgacagtacactgattggaatgaatgtttctgaaaccagtctgctgaatatgtttctggaaaaccggaagatgaaaaaaatgattatgagtccgaaatcgaacggtactctttatcctatgctccaacgtccgccggagaagatgaagttggataactttgtgtggtttgactatatccgtccgcttgataaagaggatatctttaagtggcgtggaaagaaagccggtcaggggttgaagaagagtaaccggagtgctgttcctttgcccaatcataatttatttaataaaaagaaatagctatgggaatgtttaagatggaaaagccccgccgtttcaaccatcaatatatttatgtggatgaacggaaggagaagctgcaaaaactggaggagaaagccaaacgcgagttgggtatgcttcctcccaaagaattttctccggaagatatccgtggaaagttcgttcaaggtaccaagcatttaaaacgcagaaaagaaagcgggcgtaagccgatgacttatggagctttgtttgtggccattttggttttgttgtatattctgcattacctggtgaccggtgagtttactttttaattacgtaagtttataagatatatgagcgatattatccgtttgctgccggattccgttgccaatcagatagcagcgggagaggtgattcagcgtcctgcatcagtgattaaagaattggtggagaatgctatcgacgcaggtgctcagcacgttgacgtgttggtagtggatgcaggaaagacttccattcaggtgattgatgatggaaaaggtatgtcggaaacagatgcacgtttgtcttttgagcgccatgcgacttctaaaattcgtgaagctgctgatttgtttgctttgcataccatgggatttcgtggagaggctttggcttctattgctgctgtggctcaggtggagcttcgtactcgtatggaaggggaggaattgggaacgatgttgacgatatccggctccaaggtagagggacaggaggcggtttcttgcccgaaaggcagtagcttcagtgtgaagaatttattctttaatgtgccggcgcgtcgtaagttcctgaagtcgaaccagacggaactgagtaatatattgacggagtttgaacggattgtattggttaatccggaggtgtctttcactttgcatcataatggggcggaactgttcaatcttcctgcacttcagttgcgccagcgtatcatgggagttttcggaaagaaaataaatcaggagttgttatcgctggatgtagatactacaatggtccgtgtttccgggtttgtaggaaaacctgaaacagcccgtaagaaaggagcccgccaatatttctttgtaaacgggcgatatatgcgccatccttattttcataaggctatcatggatgcatacgagcagttggttcccgtgggtgagcaagtatcttatttcatttattttgaggtggatcctgctaatattgatgtgaacatacatcctactaaaacagagataaagtttgagaacgagcaagccatctggcagatattggcagctgccgtgaaagaaactctaggtaagttcaatgcggtaccttccattgattttgatacggagggaatgccggatattccagcctttgatgcatctccatacactggtatacagccaccaaagacgacttataatcctgattataatccttttaatgtttcggctgctcctccctcttcttattcaaagcctggtaaggactgggaacaactgtatgcggggctggaacgtcatgcttcttctcaaaactttcatcctgacgagaatgattatagggcggaagaggcttctcctgcggaggaaaatcccggattgtatgatcatgtggaggactcttcagtcagtgagaaatccggccagcattatcagtttaaaggacgttttattttgacttctgtaaagtccggcttaatgatcattgatcagcagcgtgcccatatccgtattttatatgacaagtatatagaccagataagtcgtcgtcaaggtgtttctcaaggaatgctgtttccggatattgtgcagtttccgctttccgaagtggctattttgcaggaaattatggaagacttgtctttcctgggatttgaactgactgatttgggaggaggaagttatgccataaacggtgttcctgcaggtattgaaggccttaacccgatagacttgatccaaaatatggtgcatacagctatggaaaaaggtggcaaggtaaaagaagaggtgcagagtattctggcattgactttggctaaagcggcggcaattgttcccggacaagtgttgacgaatgaggaaatgacaggtttggtggatggcttgtttgctgtggctactcctaattatactccggatggtaaaacggttctttccgtgattaatgaggatgatttggaaaaactgtttaaataatttgccaatgtgctggtttgccaatgtgctgctctatgtccgcatggtaattgacacattggcatattgacacattgttacattataaagaacgtgaagattcttgaactaaataaaaacaaattcaacacaccgttattctttggcaggacttttgtacttttgaaaactcatttgccgtagaaagtttttttgagtaaggactttgggcagacaataaactattatatgaaaataacattacttagcttggtcctgtgcctgctttgttctttgaatatggcggcacaaggaagtgacataggtagtaatcctgaggataccaccatccatcaactttcaaaaaaagaattaagacgccggaaggtggctaagcgcaatatacattataatatattgggaggaccgagttatactccggactttggtgcgttaataggaggtagtgctcttgttacatttcgtatgaatccgtcggataccttgcagaaacgttctgtgttgccgatggctgttgcggtaatgttcgaggggggcttgaatctgatggtgaagcctcagttgtttttcaaaaatgataaattccgtatttttggaaaattcacttacaagaatacattggagaatttttatggtatcggctatgctaccaataagcattatgagcgcagtgactctaccagtgaatatcgttatagcggtttccagattaatccgtggtttttattccgtttgggtaaaagtaatttctttgccggtccccagattgacttgagttatgataaaatatccgagcctgccaagtatttggtagatcagcctgattacaaaaggttgggaggcactgctcacggatattccaatttcagttcgggagtgggatttctgctgacttatgacagccgggatattcctgccaatgcttataaaggcatttatctggattttcgtgggctgatgtaccagaagtttttgggaggagataataacttctaccgcttggaagtggactaccgccaatacaaaaaggtaggaaatagaaaagttatagcttggactgcccaaaccaagaatgtgtttggggatgttcctatgaaccaatatgctttaagtggcactccttttgatcttcgtggatattatatggggcagtatcgtgataaatcctctcatgtggtgcttgccgaatatcgtcagatgttcaatacggataaaagtacatgggtaaagcgtatgttgcatcatttgggttttgttgcatggggagggtgcggttttatggggcctaccatgggtaagattgaaggagtgcttcctaatgccggtgtgggacttcgtatcgaggtgcagccgcgtatgaatgtacgtctggatttcggacgtaattttgccaatgatcaaagtttgttctatttcaatatgacagaagcattttaatggaagtaaacactatgcagactgaatatatattaaaagcgatggatgcggctttagctgccggtaaggaaattctgaacgtttataatgatccttcttctgattttcaggttgaaaggaaagccgataattctccactgactcttgcagaccgtaaggcgcatgaaaccattatgacttatttgcaggaaacagactatccggtattgagtgaggaaggaaagcatttgccttacgagaaacgggcgcaatgggatacgttgtggatagtcgatcccttggatggaacaaaggaatttataaaacggaatggggaatttactgtcaatattgctttggtaaaagaaggagttcctgtttttggagtgatttatgttcctgtcaaagaaacgctttattggggtgaagtggcaaccggcgcttataaaatggaaggagtgaccggacgtgcaggccgttcactggaagaaatgaaggcatcggcatttcgtatgccctgtgccgaaacaaatgaagtttttgtcattgttgcttcccgttcccatctgtcggccgaaacggaagagtatattgaggaaaagcgaaagatataccctcatgtggagttggtgtctgtaggcagttccatcaagatttgcaaagtgtgtgagggactggccgatgaatatccccgttttgctcctaccatggagtgggatacggctgccggtcatgccatagccaaggcatccggagcagaaatatatcaggcgggaaaagaagaaccgttgaaatataacaagccggacttgctgaatccttggtttgtcgttaaacgaaattaatatccggaaacgatgctgacattcgaaatgattattgtgtttttgggattaacagggatggtgactgcattagtccttgataaaatgcgtcccggaatgattctgttctctgttactgtactctttctttgtttcggtatattgactccgaaagagatgttggagggattcagtaataaagggatgattaccgtagcgttgcttttcctgatcagtgaaggagtccggcaatcgggagcgttgggacagttgataaagaaacttctgcctcaagagaagacaacggtcatgaaggcgcaggcacgtatgctgcccgctatttcttttgtttctgcttttctcaataatacgccagtggttgtgatttttgctcctattattaaacgttgggcggaatctgtccgcattccggcaactaaattcttgatccctctttcatatgctaccatactggggggaatgtgtacgcttatcgggacttctactaatctggtggtggatggtatgattttagatgccggatataagggctttggtatgtttgaattaggccgggtgggtattttcattgctttggcaggaattgtttatttgttgtttttttcttccaggttattgccggaggttcggaaagacacggtaggcgacgaacatggggaagcggatgcgtcttcttttcatcgtgttgaggcggtgataggtgctcgtttcccgggtatcaataaaagggtgggggattttaattttgtccgtcattatggtgctgaagtaaaagaaataaaacgaagcggagttagtattgtagagaatctgtcacgggtgaagtttcatgagggagatacgttggtgctatgggcggatgattcatttatctctacatggggagattcttctgtattcgtgttattggccaatggcaaagataccgagccgaaagccgggagaaagaaacgttggtttgcattgactttattggtgctgatgattgtgggggcaacagtaggagagttgccttttatggaagaattacttcccggtattgatcttgatatgttcttttttgcagctgtaacgactgtgataatggcatggaccaaactttttccggcacgtaaatatacaaaatatatatcatgggatatcttgataaccattgcctgtgcgtttgctataagtcgcgccatggtaaattccggagtggcggatatcattgcgcatggaatcattgatatgagtgatgactacagtccgcatgtgttgctggctgttttgtttatcattacaaatctgtttaccgaactgataaccaataatgccgccgccgcattggcttttccgcttgccctttccttatccaatcagttgggggtaagtccgatgcccttttttgttgtcatttgcatcgctgcatctgccagtttttccactcctatcggttatcagactaatttgattgtgcagggtatcggaaactataagtttacggattttgtacgtatcggtttgccgttgaatatattgacatttataatttcggttattctgataccgctgatatggcctttttgatgaagttaaagacaaaatgaaaatagagaatggaagaggaaaatatatatcctatctttgaccgtatgctttcccggaaagataaagaagaactgctgggacaacggggagttatgctgtggctgacgggacttagcggttccggtaagagtactattgccatagctttggaacgtgaattacataaacgtggtttgctctgccgtatattggacggggataatattcgtagtggcatcaataataatttgggcttttcggcagaggatcgtgtggaaaacatccgtcgcatagccgaaataggcaagttgtttgttgatacgggaatcattaccattgccgctttcatcagtcccggcaatgagcttcggcagatggctgcccgtattatcgggatagaggatttcctggaaatctatgtcagcactcctttggtagagtgtgagaaacgtgatgtgaaaggactttatgccaaagcacgtcggggtgaaatcaagaactttaccggaatttccgccccttttgaagctccggagcatcctgccttatctttggatacttctaagctgagtttggaagagtcggtcaatactttgttggagttggtgctccccattgttggtaaaaaaggagaaaaaatataattcattataaaatggaagaaaattataaattgagccacttaagggaactggaagcggagtctatccatatcattcgtgaagtggcagctgaatttgagaatcctgttatgctttatagtattggtaaagattcgtctgtcatggtacgtttggcagagaaggctttctatccgggaaaggtgcctttccctttgatgcatatcgattctaaatggaaattcagggaaatgatagagttccgtgatcaatacgccaaagaacatggatggaatttgatagtggaaagtaatatggaggcttttaatgccggagtagggccttttacgcatggcagcaaagtgcataccgatttaatgaagacacaggcgttgcttcacgggctggataaatacaggtttgatgccgcctttggtggagcacgtcgtgatgaggaaaagtcacgtgccaaagaacgtatattctcttttcgtgaccgttttcatcagtgggatcctaaaaaccagcgtcctgagttgtgggatatttataatgctaagattcataaaggggaaagtatccgtgtgtttccattaagcaactggactgagctggatatctggcagtacatccgtttggaaaatattcctatcgtgccgctctattttgccaaggaacgtcctgtggtgaatatagatggaaatctgattatggctgatgatgaccgactgcccgaagaatatcgggaccgtattgaaatgaagaaagtgcgtttccgtactttggggtgttggcctttgaccggggccgtagagagtgatgccgatacgattgagaaaattgtagaggaaatgatgaccactaccaaaagcgagcgtactacccgtgtcattgatttcgaccaggatgccagtatggagcagaagaaacgtgaaggatatttttaaatggataagtaggaatttaaaatgaaggaatgggtgatggagaataaactgaatataaaggaatatttagataaggatgaacagaaagacttgctacgcctgttgacagccggttcggtagacgatggaaagtctaccctgataggacgtctgttgtttgacagcaagaagttgtacgaggaccagcttgccgctttggaacgtgacagcaaacgtgtggggaatgcaggtgaccatatagattacgctttgttgtgcgacgggttgaaagcagagcgcgagcagggtattacgattgatgtagcttaccgttatttttcaacgaacaaccgtaaatttatcatagccgatactccgggacatgaacaatatacccgcaatatgattaccggaggttctactgccaatcttgccataatcttggtagatgctcgcttgggtgtgattacgcagacctgccgccatacttttctggtatctttattgggaataaagcatgtggtgctggcggtgaacaagatggaccttgtcgggttttcggaggagcgtttcaacgaaatcgtgaccgaatataagaaatttgtagagccattgggaatcccggatgtgacttgtattcctctttcggcacttgacggtgacaatgtggtgcagaaatctgaacgtacgccatggtacaaaggtacttctttattggaattgcttgaaacggtttccatcgagaatgaccataatctgactgatttccgtttcccggttcagtatgtattaagaccgaatctggatttccgcggtttctgtggaaaggttgcttccggtgtcatccataaaggagatgaggtgatggctttgccttccggcaagaaatctcatatcaagagtattgttacttatgatggtgagttagagtatgctttcccgccgcaagcagtgacattgactttggaggatgagattgacgtgtctcgcggagatatgttggtgcatgccgataatgtgcctgtgatagatcgtaactttgaagccatgttggtatggatggatgaggaggcgatggaccttgacaaatctttctttatcaagcataccaccaatacaggacgtacccgtatagatagcattaagtataaagtggatgtgaatacgatggagcatctgtctgttgaaaacggtaaattgaaaaaggaggatctgcctttgcaattgaatcagattgcccgtgtgacatttactaccgccaagccgcttttctttgattcttatcaaaagaataaagcttgcggttcttttattctgattgaccccattaccaataacaccagtgcggtggggatgattatagacagagtggaagccaaagatatgctgaatgccatggaagttcctactttgaatctggcagctatgggtattggtgaggaacattatgaagccatagaaaaggtggtgaaagaattggaccgtcaaggcatttcagtcaagatagaaaaataacagcgtacaattaaaaaaagaaaagtaatgggattacttgaattcaacaagctgccgattaatacattggtaggcgccgattggaaaacgttcaaggcgattactgcgggaagggaaattgatccggcatatagaggaaaataccgtttgacgaaagcagtatgccgtttgctttccaccttggctccattgcaggaaaagcgatacaggaaactgttggccgacaagcctttggaacacgatccggtctttatcctcggacattggcgtagcgggactacctttatgcataatgtgttctcttgtgacaaacatttcggatataatactacttatcagacggtgtttcctcacctgatgatgtggggacagccttttttcaagaagaatatgagttggctgatgcccgacaagcgtccgacggataatatggaactggctgtagacttgcctcaggaggaagagtttgcattggccaatatgatgccctatacctattataacttttggttcctgcctaagtaccaacaggaatatgctgataaatatttgttattcaatgatatcagtgatgaggaattgaaagtgtttgaggatatattcaccaaacttattaaaatttctctttggaatacaggcggaacacaattcttaagtaagaatccgcctcatacaggccgtgtaaaagagttggtcaagatgtttccgaatgccaaattcatctatttgatgcgtaatccgtatacggtattcgaatctacaaggaatttcttcaccaatacaatccagccgttgaaactggaggatatttctccagaggcgttggaacagaatgtgctttccatttatgccaagctgtatcataaatatgaggcggataaacaattcattcctgaaggaaatttgatggaagtgaagttcgaggattttgaagcggatgcaatggctatgaccgagcatatctataaatctctttctattcccggattcgaagcagctgctccggctatcagccaatatataggcggaaagaagggatataagaagaataagtataagtatgacgaccgtacggtccggttagtggaagagaattggaagtttgcactggatcagtggggctattccatctaaaaaataaatgcccgcaatactgtttttataaggaattgcgggcatgattatcttctgctgacagaaatcagtgtatattattgggcttcgataattacacgacggttgaatgccggaggagttaaggtgttgacaccacccattccgctgataatcagattgtttttgttgacacccaatttaaccagttcattagccacgttgttggcacggtcttcacttaactgcttgttccatgcagcgctacctgtatcactatcagcataaccggttactttcaattttagtcccgggttgtcttttaccagatctgcgatttgttgcaaatttacagtagagttggtaggaagaaccgctgaaccgatctggaaaaatacagattgaggagccggagcaatttggttcactgtcacttgttctgtaaccacttcagtgggttggttggcaagttgggcctttaattgacggttttgttctatctgttgagccaaagcggtattgatggcatccatttgtgaagaggtaagtgccatgatagcatctacatccggagcaggtttgaatcctctttgtggaaatttataagtgatacccactgtagcacctgccataaaatcagggcctttactggtggtttttccatcaaatttgttttctgtacccattccgtaaagttccagattcaagtcccaggcactggccagatggaatgtattgatgataccgaaattgaatgccagtgaattacgacgtggagcatcatatgagtgggcaaaaccgaaacctacgaatggcacgaagtcgtatatgcggtcttcattatatccggctatcatgttactgacattaaataagatgtcaccatgcaaattcatgtagttgaacttatcctgatagtatccttcgcttaacatgtgaggtttggaatatgcggaaggttcactggaaaaactcttcgactgcaaaccactatattgcaaacgtaatcctaagccgggagtaaaccatttgccgattgatatttgaagagcgggagcaatacgtttcttgaatttaccaagatcggactgatcgccgaacagtacttgtgcacctccaccaacagagaagaaccaattatcgaagaagtgattggtctctaccttgtacttatccacaggtacctccattacatctacactctcgcctacaaggacgttttgtgaattgcttttctgttgcgcaaacgctacagaacttaaactggccgcagccagcaaaaacattaattttttcatactcatttctattagttaattattgtccaggtttatcttcccaaattcaactaaataacatgagtgctgataaaaagtttgagtaggttgactatttaatatttttttatgaaagaaggctaaaaagatagtgggtatctgtgctgtgtccggcatcaaaactgaatccttcccatttgaatccttttaaatccccaggattctctatccggtttttaatgatgaagcgtgtcaattctccacggcacatttttgcataaaccacaacggtggttaatttcccttttttccatacctgaaattccggcgtgatcacttgtacttcctgctccacgcgtttccagtcgaataaatctttcatctccccacttgccagattgattagtattcctcctcttgctttaatttctttgataaaggtgtcggtcagaatcggcttccaatagtcaaacatggatattcctccacgttcgggcagtttgatatctccttccattctgtaattcttgatctggtctaacgggcggagtaatccgtaaagaaaagaagtgatccgcaagtgatcctgtgcatattgaaaatcttcaggagtaaagtcctgtggatggatacgtttatatactataccggtataagccagtaaggcagctaaagccgagggagagtccgaacagaaatcttgaaatcgcatatagttctccgctgctattttgctgttcacacgtaaaagtcgttccagttcttcagcagagaattgggacatatcaagtgcattctgtattgcttcggtttggaattgtggtgtgctggtaacaggagtttgtattttgctccgtccggtcattgttttggcacatgaaataaaagtcatcataggctaaaaaataatattttctggcggcaaatataagaaaaacagatatatttgtctttgttattccataattaaatattgagaactatgaaaatgaaaaagttaggattattgttcatgatgctttgcatggtatttgccgtaaatgctcaagaattgaaaaaaggagataaattacctgattttcatctaaaatctgcggtatatggagatgtttcttcggctgaattgaaaggtaaggtcgttttggtgagcttatttgccacttggtgcgggccatgtcagctggaactggctgaaatagagaagactttgtggcctgaatataaagataacaaggacttcgtattattagtaattggtcgtgagcatacggatgaacagttgagggcttataatgaacggaagaaattcactttcccgttatatcccgatcctaaacgtgaggtgttctctttatttgctgaaaagtcaattcctcgcgcctatcttttcaataaagaaggagaagccgtttatacttccatcgggtatgagaaagaagaatttggatatctgatgaatgccattgcggaagcattgaaataggaccctgttgatatttcaagatgactaaactgttctcgttgtttattatattgtcttttgttctcccggttagtggacaggaaaagcttgattcagataaagcaagaaaagaaaaagcttatcatttgacgggttctgtcagagaacagggagaacgcccttatcccgatcctttgccggatgtaaatatccaactttattctttgcctgatacgagttttatagaaggtacggtgagcgataagaagggtgttttccgtttgtaccctatgaatcccggtaattatttaataagggcttcttttttaggatatgaaaccattgaaaaaaaagtgaatattcctgcttatcggaaagaagtttatggaggtgctctgatgatgaaaccttccagtattgtattggatgaaacggttataaaggccgaactgcagaaaatgaagatgtccggagatacattagtatataataccggagcctttaagacatcggaaggagctgttctgcaggatttggtgaggcagcttcccggattggaattagacgagaaatccggcaagatgaattttcatggaaaggaaatcactcagatcttattaaatggaaaggagttttttgcagatagcaaagttgctttgaacaatatgccggtagatgctttgaaagaggtaaaggtatacgagcagcagtcggataaagagcaaatgacaggggtgtcagacggtaagaagaaaacggtgatggatgtgaagaccaagaaggatttgacagatggattaatgggggacgtttcagctttgaaaggttcgggggatatgtatggagcgaaaatgagtttgaataaatttgtcggaaaatggcggatgtccttgtatggtgatttaggaaaactccccagatatggtaattttatcagtgatatggccgataatcctgctcaaatgaaggatattggttttagcttgggaacggaaataaagaagctcaacctcaatgtcagtgcttcatataataataataaaagcgcggatgaatcgcgaagccagtcagaagaatatctgcctaacggtagccaatatgcctataataaaggcttgagtacgggtaggaatagttctttttgggagaatatatatctgacgggaagtttgagtgaccggacggaaattaatttcaggcataacatcaatcatagccggttaaattcggtatcagaaaatatttcggcgactttcagtaccaatcctttggactatgtttcagagccttggagggacgatgcaatgattcctcctgagttcaggataaataaaaatacgggaaattctcaaaataagacgaacaatctgatgataggcaataatcttttgctcactcataatttgaatgatataggccggaaactctccatagagttaagaaatgattatagtaatcaggcgagtggtaattatcagcaatcgtctattacttattatcaattgaagaatgacctgggggcagattcggttttatatagaaatcaataccgggagtcacctgccagaaatttattattggcgggggaggtcagctatacggagccaataggaaaacaaatgcttcaggtttattatcggcatgagtatcaacggcagagtaataatgcggttacgtacaatttggatgaggatgctttgtggggaagtcttccatctggttatgaggcaggaagggtggatagtttaagtgattatactcgtaatgatcttcattccaatgaattcggactgcgcaccacacttaattggagaaaagtgaggttgaatatccggtttgggctgtcgcctcagaagtctacgacgaaaagcaacaggggaaaagtgaagatagatacgaccattaccgtgttgaacatagtgcccgaactgcattttgattatgatttgggcaataaccataatatgagtgtgtattatagcggatacacccggcagccttccatttatgatttgttgtctgtgcccgattatactaatcctctgaacataacaatggggaatccggggctgaaacccgctttcgggcaaagtatatctgtgaattacagaggaggaaatatggaaaagcaggaaatgttatattgtggtttgagatataataatacgataaatgatataagccggaaaagaacctatgatgagaagagtggggtatataccagtcggcccgagaatataaatggtaattggggcattggcgggaatatatattatacgaataaattattcaagaaaattttcgctcgtcttgctactaatgcaaattataaccggagggtttcgtatgtgcagataatgggagaagccaatgagaatgatcgtaacacctcccaaatgctttccttgatgcaggatgtggagtttgcctataaattggaagagcatgagtttaagataaatggagcaatcacttatcagcaagccgataacagttatacaaacaattcggattacaggacgtatgacttttattatggcgcggagtgtcgactgaagttacctctcaacttgaatctttataccgttgtgagaagtatgaatcgcaggggatataaggatgaggcctccaatacgacgcagtggctttggaacggtgagctgacttacagttttctgaaagggaaaagagggttgcttaaatttcaggttgttgatattctgcaacaacgggattttgtcaatcgttggatgaatgataccggacagggagaaacttggacttggggattgggacgttatgcgatggctacttttacttatcgttttaatgatctttcccgttaggagataaaaaaggagctgattcaggcaaaacgaatcagttcctttttgaatatccctaagaaagattatttgtaatcttgccagctctttatctgaatatccttttcactcatttcacagaatgcttcaatgaaagcacttgccaaacgggcgttggtaatcaaaggaatattgtggtcgattgctccacgacgaattttgtaaccattagtcagctcacgtttggtatggtttttcggaatgttgactatcaggtcgaatttatgttcggcaatcatcttcatgacattgttttctgcatcgggcttttcatccggccagtaaaccggtgtggtatttactccgtgtgcattcaagaaagttgcggttccggcagttgcatagatctcatatcctttttctgccagcatacggcttgcttccagcaaatctactttggatttggtggcacctgacgagaacatgacagattttgtaggaatcttgaaaccgacagcaatcatagagttcagcaaagcttcatggaagtcatcaccgatacaacccacttcacctgttgaagacatatctacgcccaatacagggtctgccttgtgcagacgggagaaagagaactgggaagctttcacaccgatccagtcaatatcgaatgccgacttgtccggttggctgtatggagcacccaacatgatgcgggttgcggtttcaatgaagttgcgtttcaatactttggaaacaaacgggaatgaacgtgatgcgcgcaggttgcattcaatcactttcacttcattgttcttagccaggaactgcatgttgaacggaccggaaatgtttaattctttagcgatacggcgaccaatcttcttgatacggcgtgctgtttcgaaataaatcttctgagccgggaatactaatgtggcatcacctgaatggacacctgcatattcaatgtgttcggagatggcatattccactatttcaccgttttgggctacagcgtcgaattctatttctttagtatcttgcatgaattgggatacgactaccggatattctttagaaacttctttagccatctgcaagaattccttcagttcatcttcgttatagcatacgttcatggcagcgccagagagcacataggaaggacggaccaataccgggtaacctattttgtttacaaattcttccatgtcttccaggctggtcaattctttccatgccggttggtcaatacccagttggtcaagcatggccgagaatttatgacggttttccgcacggtcgatagaaagcggagaagttcccaatacaggtaccgactgacggtgaagcttcatcgccaggttattaggtatttgtccacctaccgatacaatgacaccacccggctgctccagatcaatcacgtcaagtacacgttcaaatgaaagttcgtcaaaatacagacggtcgcacatatcatagtcggtagaaactgtttcggggttatagttaatcatgatggatttgtaacccaacttgcgtgcggtttggacagcatttacagagcaccagtcgaattccacggatgaaccgatgcggtaagcgcctgaacctaatacaactaccgatttttcatttttataataattgacgtcataacccgtagtagcgtatgtcatatacaggtaattggtcaattcgggatgttcagatgcgacggtattgatacgcttgacagccggaaggatattcaaagctttacgacgggcgcgtacagccaagttctccttttccatattgccactggctttcaatacgaagcgtgcaatctggaagtcggagaagcctaatactttagcttggcgaagcacatcttcgggcagatcctcaatcttattataagtcgaaagtttggccttatagtcaacaatgtttttcaacttacccaggaaccacgggtcgattttggtcagttcgtggatgcgttcaatgctgtatccttcttccaatgccgaggcgatggagaaaatacggaggtctgtcgggttggccagttcctcatccaggttttcaaatttagtatggtcatttcctacgaaaccatgcataccctgacctatcatacgaagacctttctgaatgatttcttcgaaagagcggcctatagacatgatttcacccacagacttcatgctggagccaatctggcgtgatacacctgcgaatttagtcaagtcccaacgggggattttacaaatcaagtaatccaactggggagcttcgtaggctgagttgggagtacccatctcgccaatctggtctagtgtgtagcctaaagcgattttggcggcaacgaatgccagagggaatccggttgctttagaagccaaggcagaagaacggctcaggcgtgcatttacttcgataacacggtagtcattcgtttctgcattgaaagcatactggatattacattcacccacaatatccaagtgacggatacattttgtagacaaatcttgcaacattgttacttgttcttctgtcagagagcaagtgggggccaccacgatagattcaccggtatggattcccagcgggtcgaagttttccatgcttgccactgtaaaacaatggtcgttggcatcgcggattacttcgaattctatttctttccaacctttcaatgactcttcaaccaggatctgtttagagaatgcgaatgaactttcagccagtttgatgaaagcttcttcatccggacagatgccgctgcctaaaccacctagtgcgtatgcggagcgtaccataaccggataaccgatttcgcgggcagctttcagagcctcttccatactttccacggcgtggctcttcggggttttcatcggaatttcatccagcttctttacgaataaatcacggtcttcagtgtacatgatggcttctaccgaagtacccaatacttctacaccatatttcttcagtgtaccgttcaggtaaagttcggtaccgcagttcaatgcagtttgtccaccgaaagccaataaaataccgtccggttgttcttttttgataatttcttcaacaaagaagggagtgacaggaagaaaataaaccttgtcggctatgccttccgaagtctggatagtcgcgatgttaggatttaccaacaccgaatgaatgccttcttcgcgcaatgctttcagcgcttgtgaacctgagtagtcaaactctcctgcctggcctatcttgagtgcacccgaacccaataccaggactttctttaaatcctttttcattgaaagtttcttttattataatagttgttttaatgtcgctaaatattaaaaaaaatgcgtccatcctcgtacgaggactaacgcatttgttcgtatgtctatattatctttgttcctgtaggatacatagcattactaaattttgtgcaaagtaacgacttatttccaagataacaaaataaatcaagatctttgtcaacacaaattaaaataaaagtctgaaatcctctccgaatgttctgttttttgtatatttattcggatacttctgtatcatcggcatacgaaaagcggaatgaatatcctatattttccgatccgcccatcagggtcatatcttttagtcttccatcctgccggaaactatagtcgtatatataataagtgtcttccagaatattggcgcttcttttccctagaatttcggccatctgtccgaaagtgttcattacggtggtatagttttcacggtcatcaatccattgtgccagtgtgttcaagtccagactataatcattggcgatattggaaactctgtaatcactgttgtaagttcctcttggagtagtggttatggaagatagatttccgctttcccaattgtattccaatacggttccattgttattgcagcttttcagataaccttcattgtcataagaataggttaccggattttcccggttggagaatttgcatacataacttctgccgttttccaacgaggtgcttatttctaccaaaggagaattttccgtagagtaagtataactgacttcagagttctctttgtacgtgtaatttactgccgctaacggtgaactgctataaatgcgggtcagccgtttgttgttgtcgtaagtgaggcttatcattccctgataagtgataacatctgaaattttatgcactttaattccggtaatcatccgtgaaggttccggtacgggaatacttttatcgtcatcatcggaacatgcggcaaagaacaggcttgctacagaaataaatagagctagtttaatggtcggtcttagtttattcatcgaaacaattattatatgtgaaatagcggttcaaagttaagtgtttgtgtcagaatattcctatctttgcgtaatttttaatataagataatatttaagagatatgggaaaagaaaaaatcatactgaccggtgaccgtcctacgggaagattgcatatcggtcattacgtaggttcgttgaagcgcagagttgaacttcagaattccggactgtatgacaagacttttattttcattgccgatgcgcaggcattaaccgataatatagaaaatcccgagaaggtgcgtcagaatgtgattgaggtggcgcttgattatatggctgtcggtctggacccgatgaagtccaccatctttatccagtctcagattcccgaattgtgcgaattgactttctattatatggatttggtcacagtgtcacgcttgcagcgtaacccgacagtgaaaaccgaaatccagatgcgtaattttgaaaccagcatcccggtagggttcttcacttatcctatcagtcaggctgctgatattaccgctttcaaagcaactaccgttccggtgggtgaagatcaggagccgatgattgagcagacccgtgaaattgtacgtcgtttcaatcatatttatggtgatacgttggtagaacccgaaatcctgttgccggacaatgcggcttgtctgcgtctgccgggtacggatggaaaggctaagatgagcaaatcattgggtaactgtatttatttgtcggacacagccgacgaggtggaaaagaaagtaaagagcatgtataccgaccctactcacctgaaagtttccgatccgggtaaattggaaggaaatacagtattcacttatctggatgctttttgtaagcctgagcattttggacgttatttgcccgattatcctaatttggatgaactgaaggcacattacacccgtggtggattgggagacatgaaggtgaagaagttccttgccgctattatgcaagaagaattgacgcctatccgcgaacgtcgtaaagagtttgaaaaggatattccggctatttacgatatgttacgtaagggatgcgaaacagcccgtgctacggcaaccgctacattggatgaagtacgcaaggcgatgaagattaactattttgatgatgtggaattgattgccgaacaggcaaagcgtttcgggcaggaataaaataaattcaaaaggaaaaaggggaaactatatataataaggtatagtttcccttttttgtttcttgaatgataagacaggatttgtaatttatcctctgtatttcagtgtgttaagtgctggattgaaaaataaataaaaaaatagtgtgcataaaatttgcagttatcggaaatagccgtatctttgcaacgcttttgaaacaagaggctatcgggcgtttagctcagctggttcagagcatctgccttacaagcagagggtcggcggttcgaatccgtcaacgcccactccatcttcacctcttgttttataaaaagcaactatcgggcgtttagctcagctggttcagagcatctgccttacaagcagagggtcggcggttcgaatccgtcaacgcccaccgaagaaagaaattaaatattgcacgagaaagcactatcgggcgtttagctcagctggttcagagcatctgccttacaagcagagggtcggcggttcgaatccgtcaacgcccaccgaagaatgaagccttgcacacaatgatgcaaggcttttttgtttcagtaagtttccctagttaaaatgtatgggcatgaaaacattgctacttatcgataatcaggatattacccgtgaaggtatgaaaacggtggccggtcggataggagggttcgccgcaataaaggaagccggcagtcagagtgaattaaccggacttcttgtcgataatcccaatgccgttgcagtgttggactatacattgtttgatacttcggctgaatatttgcttatattgcaggaacggtttaaggaggcacattttgttctgttcagcgataatctgagtgaggatttcatccggcgtatggtttttagcggaacttcattcagcgtggtgatgaaagatgcgccgatgatagagatagaggaagggctgcggaaggcaaaacagcatttacaatacatgtgtacgcgtgcagtctggctgttgcagcataaagaagacaaaaaagataagttagtttcaccgcttacggtcacggagcgtgaaattctgaaactgatggcattgggcaagactacgaaagagattgcggctgagcgtttcctaagtgtatatacggtaatgactcaccgcaaaaatatctttcgcaagctggaagtgaacaatgtgcacgaagcaacaaaatatgcccttcgtgcagggattgtggatgtggtggaatattatatttaggataaagtgatttcaccgcttcccacacagatttccgcattcttgtcatacagcacaccgaactgtccgggggctataccctgtaaggggacgtggctgtggattcggaacaagttatcttcccgtgtcaatattcctttcatgaaagtgtctgtatgccggatcttgaaagaaacatctgcggaaggtgctcccttccataagtcctctgtgatgaaatgaaaatcatgcaaggcaaagtctgtcccatattgtttgtctgtatcataaccgtgtgagacataaatgatattctcgtctatatctttgcggataacaaaccatggtcctccacctagtcccaatcctttgcgctgtccgatggtgtgaaaccaatatcctttgtgagtgccaatccgttttcctgtttccatttcaatgatatccccttctttttcacccaagaaacggcggaggaactcattatagttgatttttcctagaaagcagataccttgactgtccttgcgttgtgcactgggcagtttggcaatgcgggcgatatccctgacctcattcttcatcagacctcccaaagggaacatcagttttgaaatttgcagataatctatttgtgccaggaaatctgtttggtccttgacggggtcttgtgcggttcccagccatattttcccgtctttttcaagaatactggcgtaatgtccggtagctgtcttgtcatataaatgccctgcttcctgctcaaaacatccgaatttgatgagcttgttgcacattacatccgggttgggagtaagaccgcgtttcactttatcgatggcgtatgccactacattatcccagtactgtcggtgcaggtcaatgatattcaggctcagaccgtatttgcgggcggtggcggtacatagttcaatgtcctcttctgccgtgcaggtgagatcttcgtcaccgtccattccgattttaatatagaaaagatccggtttgtatccttgttcgcagaggagatgtacgacaaccgcgctgtctactcctcctgaaattaatgcagctatgttcatctcattttatgataatgggtattcttcaaaagcataaagtacggtagacaaatatcgttcccccgtatcgggcaagatcactacaatttgttttccttcattttcggggagtttggccagttccaatgcggcataggcggctgctcccgaagatattccgaccaataacccttccgtcagagagagttcgcgtcctgtgcggatggcgtcatcgtctttcacccggattatcttgtctactaatttttcattgtaggtatgagggataaatccggctccgataccttgtatcttgtgcagtcccggatttcctcccgaaaggacgggggagttatccggctctacagctacaatctgtatatggggattctgtttttttaatccttccgctactccgcttaaagtgccgcctgtaccgactccggcaacaaagatgtctacctttccgtccgtgtcgttccatatttcctgtgcagtggtacgtgcatgggcggcgggattcgccgggttttcgaattgtcccaaaatgacggctcccggagtccggtcacgcaattcctccgctttttctatggctcctttcattccttttgcaccttcggtcagtaccaattgtgctcccatggcttttaacaggttctggcgttcctcgctcatggtttcgggcatggtcagtatggctttgtaacctttcacgctggcaacccatgctaaccctacgccggtgttgccgctggttggttcaatgataaccgctccgggtttcaagattcctttggcttctgcatcctctatcattgccagggctatacggtcttttacacttcctccgggattgaagtattccagtttggcaattatttgcgctttcgcatcgtgttttttactaaggcgtgacagttccaacaagggagttcctccgatgagttcggtcaattctttttttattcttgccataatcttttcatttagtgggttctgattttataatgcaaagataggggaagatgttcatggcggaaataccctatttagggtatattttatagtgttgtctcctgaataattcactatctttgtccggaattaacaagtctaatctatgatgataacaagaaattttattggggtactagccctttgcttgtgtgcattggcagcttgcacatcttcaaaagagtcgaaaaagacgctgactgtcctttcatggaatgtatggcatggcggtcattcaaaaacttattccggaaaagggtgtgagggaactattgatattctgaaaaaaagtgaggctgatgtggtcttgatgattgaaacttatggagctgccccgatggtagccgactcattgggatattcgtacaatctcatttctgataatctttctatttatagccgttatcccattattcggaaatatgcttttgccgacagcataagtacctttaattttggcggagtgatgatagatgtggatgggaaacctgtccgtgtttttaatacttggttgcattatcttcctgatatgcgtttggtcccgacggataaatccaaggaagaaatattggcttgggagatggagggaacacgtgatgaggaaatacataagattttgtctgttcttcaacccttgttggcagaggccgacagtattccaattataatgggcggtgattttaacgtgcattctcatctggattggacggaagctacccgtaacctgtatcttcatggtggtgcagtggtggattggcctgtttccattgctatggaagaggcgggatttaaagatagtttccgtgagatgaaccccaatccggtggccaatctgggagtaacgtggctgacagatgcggattcgttggaaaccgagtgtcgtatggaccgcattgattttatttattatcagggaaaaaccattcaggcgatagcatctgagtgttatgacaatagtttgggtaaaacttttacttttaaaggagaagattttttctatccttcagatcatggttttgtcctttcgaaattcgaacttgattaaaataagagttgataaaaatagatattcatgaaaaagacctttttattatcgtgcctgatgttggccgcaatgccggtgatggctgcttacacgggccatgtatatgtagataaaaacaagaatggcgtatttgaccaaagtgaaaaaccgctggcgggcatcaaagtatccgatggcttgaatgtggttgaaacggctgccgacggtagttttactttacccggtcatgagcgtgaacgttttattttcattaccactccttcggggtataaaacatttaaccgtcattatcataaaatagaaaagaaacagtccggttatgatttcggtttgatcccttacagtggacggattcgtaaagacggctcccacaggtatattcatattactgatacagagatatttaatacggaaaatcatgcagactgggtgaataatgtgcatgactatgccaggaatgaacaggcggcttttatcattcataccggggatctctgctatgaaaaaggcttgaaggctcatatcaaactgatgaatacggaaaatatggactgtcctgtcttttattgtatcggaaatcatgatttggtaaaggggaagtatggcgaagaactttttgaaagcatttatgggccggtatattattcttttgatgcaggtaatgtgcactatgttgttacgccgatgcccggaggagaccatgctccaggctatacttccgatgacgtctgtcgttggttgaagaacgacctggctcatatccgccccggaactcctgttgttgttttcaatcatgatttgctgacatacgaagatacctttatttttaagagcaagaatgccggaagcattaatctgaatgagtacaacttgaaagcatgggtatatggtcattggcatattaactatatgaagaaacagggagatgtttacagtgtttgtacctcttcattggataaaggaggcatagatcattccactactgcttttcgtgtgatgcacgtagatagtaaaggagatttcacttccgagctccgttatacctatttggacaagaatatctgtatcgcttcgcctgcaggagtaatggcttcgggtgtccttccggtggctgtcaatgtgtattcttccgtgtcgccggtgagagaagtgctctatacttgtctggccgacgggaaacctgtgctgaaaaacaagcgattgctgcaaagtactgactggtcatggaacggggagcttcccttgtctcataaatatgtgggtaaggaacttactttgcgggtaacagcccgttttaataacggagagatagctgaagcagaaagtaattttatctgccggactgaaaaggccgttcctttgttttctgctgactgggataatctgtcaggcaatgcgaaacattccgcccccgtttccgctccattgaatttgcctttgcagctggcatggactaacaatgtcggagctaatctttatatgacttctccactgatacacaagggaaaagtaattgttgcctctgtggatgaggatctgaaaggtgcaggccatgtgtatgctttgaatgggaaggacggtacaattctttggagttgtcctgttcgtaattctattaaaaactccattgcggttgatagtgacatcgtgtttgcccaggatgcccaaggctttttgtatgccattgataccgaaaccggtaaattgtgttgggaaaagcaattgcccgtaaatggcttgccggcccttattgacggactggtggccggtgaaggagtggtctatgcgggaaccggaaaggggctttgtgcttttgaagcccgaacgggcaaacaactttggaaaaatgaaggctggggacaaggagaagggactacgagcacgctgactttgggtaacaacctgctggttgccggtgcacaatggaatgccctttacggcaatgatgccaaaacaggtgagaaactttgggcggtcagcgataacggtttgcgtaatcggggagcatctcctgccatgcatggtgccttgttgtatctgatctcagataagtctttctttatattagaggctgctaccggaaaagtgatagtccgtaaaccattaccttataatgtggacgttacttctactcctttactcactgacaaggagattatctttggttctgcacagaaagggctgatagccttggatagtgagacattggaagaaaaatggacttgtcctgtgggggatgctttggtttatacctgtccttatagccgtcagccttccgctacgattgaaaccagtgcggtatgggcgggagatattgtttatgtagccgcttcggacggtacggtatacggaattaataaagaggatggcaaggtggtatggaaacatgctacaggagctcctatgttcgggtcggtagccctgtcgggtaatgcattggtggtttcggactttggtggaaatgtttatttgttctgtaagtagagttacgtagattacgatatgatatgggcggtaagtgtgaagtatcttctttcttatgatggaactattcaatggatcaaacaggaactatctagttaaataaccataaagtctgcccggaaatacttccgggcagaatcattactgtacctttgttcccataaaatagatacaggccgtgaggcccaatttaattatttcacatgacatttaaagaattagatcttatagagcctattttgaaggctttacaacaaaccggctatacaacgccgacccccattcaggaacaagcaattcctgtattattaaaaggtaaagatttgctgggatgcgcccagacaggaacaggaaaaacagcagcttttgctatcccccttatacaacgactttatcaatcagaccataaaaaaggtatcaaagcattgatactcaccccgacgcgtgagcttgctatacagataggcgagaactttgaccaatatgccggatataccggagtgaagcatgccgtcattttcggtggagtgccccaaaaggcgcaagttgatgctttgaaacgaggtgtgcaggtattgattgccactcccggacgtttgcttgatttgcagtcgcaaggctgtatttcattgaaggggttggagtattttgtattggatgaggcagaccgtatgcttgatatgggcttcatacacgatatcaagaaagtattgaaactgattcctgcccggcgacagactttgtttttctcggctaccatgccttctgaaatagagaagctggcagattccatgttgactaatccggagaagatagaggtgactccagtttcatctactgttgatactatccggcagagtgtttattttgtagagaagaaggaaaagaaggacttgttgctgcatttgctgaagaatcctgagatagagtcagtgttgatttttacccgtaccaagcatggtgcggataaattggcgaggattttgaacaagagtgagatcggggcggaagctattcatggaaacaaatcgcagaacgcacgccaaagggcgttgacaaacttcaaggatcataccacaagagtgctgatagccacagatattgcagccagaggcattgatgtgaaccagctttctcacgttatcaactatgagctgcccaatatatcggaaacttatgtgcaccgcatcggtcgtaccgggcgtgccggacacgacggaatagccatctctttttgtgaatcggaagaattgccttatttaaaggatatccaaaaactgataggactacagattcctgttgtgaaagaccatccttgggtgaccgtggaaggggaaaaagcgcaggccggcaagaccgaagaactgaaagaaaaagcaaaagccaataaggtgtaccggggcagcaaaagcaatggtgattattggcgcaggaagaaacaggctcaaagcagacaagggcaaggcaggcagagttcggatagaaaggcttccggcagacaaggataaagaataacttgtctgcgtttcattataaaatagtttatacttgtttttataacctgtttaaactgaatgcatttattaatgcagaagagttccccgctttccatctgtttggaaaacggggaactcttctgatatcttgtggtattctttcaccggtttatcaaacttttgcattattcgttgtttatgcggcttttcctcatttaactttattgtagggtttagtgatagtataggaatagctaattctttttgaccgtaagagtaagcctttttgaaaggatgtgttctatctccatagcctttggagttaactcccaagcttatggagataactccaaaggctatggagttaactccgcaagcttgggagatagaacataaaaggaagaaaacgcttaatgattaaaaagaaagattttaataataagaaaaaaggattgcatttcatttcaagtcttcaataatcttctccatatccacaggttgcagtcggtcatagactttttatcattattacagggagcaatccataggcgcctacacaccacagacagtccggaaagaacttgccatcgggagttgtttctcctgcttctattcccaatatccgtttaaattcttccggtagtttttcggagccgcgtaaacggcagaccgttcccatgcatacggagatgggatgttttcctttggggatcatggcaaagaacgtatagaaagtaaccatgccatacattttctatacgggcatgttcagtttgcgggcgatgatacgttacatctcttcaggctggttcccatgcttgttgccaatctttccgctttcttcatgattgcttgtaatttacaggtggggcgtattttcatgggcataagaattagtgtgttgcaaagatcggaaaatgtccgggttgataaaggaagagtggaaaatatgaaaaaaaagaagcccggtccgtttggtggtgaacggaccgggctttacaatcaatttgtcaaccatttatagccaatgggaactgctgtgcctccatcggacctttagaattgtgcgacagggcgtgtggcgtagttgctggctttactgttagcaactatcgcaccacttacaaaattcagatgccaggcggattctgccgagtgttcggaagaagaccagtacgctttgcgtgcaaaatcattgaaacaatcttgtttgtctttacaaatgattccggctttttgaagttcccacaacaaagtcaactcgcctgccgacggtaaataccattcacctgccgatttgccgctggtactgtattggtagcagtagcctcctgccgggtagctggaagaacttttaccgaggtaggcggtgtgagcctttccattgaagtcgctgatggctccttctgacacccaggtggcaggttgtccggtttcaacatgaatggttgcccccttgatgcgttcctcgtccttatcggagaagaaagaatcggcggttccgttataataagggaggacaccgcttgtcaatgtgccgtcggcggtggtatagttttcgatgccttctatatcttctgctttgctgatccatttggtactggactggttgtcgcctaatgccacgatgcgtccgaatggagaagtggacagggtgggcgagagattgccgtccgcatcatccagggcatagacaataccgatgcaggttttattctcattcttctcgctggagaaagtagcgtcgctatagtaataatcgcctaccttggcagaaggtaaaagagtgcaagtgagtgccggagcttcgtatactttgcctttctccaatttgatggttgtcgaagtagctgcctcatacacttcaccggtggtggtaacaagagtgaaatgcaactgtgcttcggaagggaagaaggagatgtaggtggttccggaaataccggctttgtttttaatagtgatatttcctgtttgggtactgctgaactctccgttttttagtttcataacggcactggagtagagggttccggcagtggcggttatggtaattcttgtgatgttgttcaaaggactgccaccgttgacggtgaactggaatttaccgatagtgaccaaactggtcatttcgcaggcggaagagcctgtggtttcgttcatgccggctttacattgtgcccataagtaatcataatttgttatacctgccagtgttccgtcctgtccgctcaggttgagggtttgggtcagggtgtcactgctgttcgcggtgatggctgccgccgggtaaaatacggcaatttcattctcattctttaccagtgtcgaaagattgcccgtaaaggtgtcagaagagtcggtttttcttgtgagaatgcttttgggaacgccgctggaaccggtttttattacggccagttggctgttggcgtcccagttgccttgcaggatgcctgtatcctctgcatctgaagaacggggagacagagatgctgtgagagaaaaaggaacggtggaggttgtcgtaacttgatcgtcgtcatcgctacaccccaacatgcatagagcgatgcccaaacagagaatagttgttgtctttttcatcatcgttttcgttttgctgttttatgattaaaacttgaatggtatttattatttaattttagacagcaaaggtaaatgttctcggccgatttttctaatctattcggcgaaagctgattttttttcgataaattaggggaataaggggaaatttgaggagatggcaggggtgttcattgtctccctgtttaaattctcattgaaaatcatagttttttgttgttttgaatgaagggaattgtatgaatgaaaatttaaacagggatttttatggaaactttttagttttctttgcctttttgatcgggatatagtgactggtaataattgattcgttctgtccatggacggtattcaaaaggataaacgtgttgttgctctgcccatcgtgtccatttgttttctaattcttttgcttttaaaggaaattgttcggaaagatcttgtgtctcaaaaggatcggtggtgaggtgaatcaattcccaaggctgtctgccgttggcacgtactagtttccaaccgtcagacaggatggcgcatgaggtctgatgttcaaagaaaagatcgcgcggctgtattttctgttttcgtatagccggcaggagactggttccggccaatttcactttttgattgtgaaacgtgtcggggtaatgtgcggaagcaatatccaggcaggtgggaaaaatatcaatgatatgactgggttcccgacagatactgcctttttctgtctggcttttgcttcttccgtctgtaaggatgagaggggaactggttcctccttggaatacccattgtttgtaactgcgatagggggtattgcttaaatcagccatcagctgtttgatgaatcccccttcactggtagagccgttgtcgctcataaacagaaacagggtatgttcatacattcctttgtcttttaaggtctgtattacctttcctatgccgctgtccatgatttcgatcatggcggcataggtagccatatcggttatccatttttcttgctgctgtggagtaagttcggtccaggcgggtcgtttaccgtccggaaattctttttggaagactggaagaaccatttccggcgttatcagccctaaggctttttgacgttcgaaacgttgttggcgtagaacatcgtagccggctttatagcgctcacggcaagcatctatcttgtcttgaggggcttgtaggggcaagtgaggtgcgtaatgtgctatgtacatgaacatgggagtctgcgtgggatgttgtttgataaaactaacggcagagtctgtgatagcagtggtatagtaataatcatccggaaactcggtaatccgttgcaggttatgataaacgggatctggtttgtaatagcttccccctccatgcaggcagccgtagtatttgtcgaatccccgttgaactggataacttccattgggggtttcaaaggccgcatctaaggtaacatgccatttgccactcatgtaagtggcatagccttggtcgcgcagtacttcggcaagggtgggcaggtgatccgaaatctgtccccgataccccggacgatgttcgtctaccgcggtcatccatcccatttccgcttcgtgctgataatgtccggtgagtaaggcggcacgactggggcagcttcgtcctgtgtttttaaattggctgaaacgtatgccttgttcggccagataatctatattaggagtatgtatttctcctccgtagcaggataaatcagagaatcccatatcatcgcataaaatcaatacgatatggggatgttccgtgtctggtttggcgtgagtggctgctacagtggaggttatggcagttagtgctagggttgtaacggttaacttatatgtcatgggtgatttgtattttagttttttcattttgttccatcccttgtggggatggagtagaagaggctttgaattgcttttctctttctgcctcttccccacaccggatggaaaggtttacttcttttcaccgaaatcagcttgctgtttttccacttctttcagcttttgtgcattccgttctttcagcaaacgttcctgttccagttcggaagccgatttggcggctgattgcccgaaaggtgagtcgctgttcatggaaatcagcgcagcttcactttcggtgtagatgagaggatgagccgccggcttgctttctaattccaacactgcgctggcaggcatttgcgagccttcgaacaatacgctggcagtgattttgattttacccggcttcaaggtggattgtatcagcacgggggctgttccccattttaccggagccggattggccagtatattcgctccgcccaaaatacgtccttcgccttctacatggaatttcacataatagttgttcagacgtttgatgttcccgtttttatcggctatggcggctactacggttacaaagtcggagccatcagcttttaagtcggtgttttcattgtcaacccaaagtagcactttctcgggacgccgggccggtcgtacttcgtgcgtggcaactacttttccatctatgatgccttcggccagtaggaacacctcgtcctgtttcttctttctcatagacatgtttttgtctatcatgaagtcgtatatatctttgaatgtaataacgggtgagggcattccttcttttgttgctggcttggtgtaagtccatgtcttgccacctttattataagtaagccgcacctcgtcacaattggagtacacagtaacgtctttgggtgagaagggagtcatttcatgggcgatgtacaccatcggtcctgtttcgaaaagacggtcttgtttttcgggcgagcgctgggctttgaacatataataagcatatttgggttgacggaatacgtccatcacaccaccatagaagggatcgggatgatagccgcgctggtggtcgaacgagtgccacaaacagccgccgacgtgttggcgcggagtacggcagagtacatcgtaacaggtgaaaggataacggggggcggcataatgctgtgcctggatgagcatagcctgttccccccagttgcgtgccacacggctgggggagttgtgcgaattccagtcgtctacattatctccccactcgcgggtgaaataggttattttagggtcgaggcttttgatggcccaatccttgtccgcattggccggatgagtgaagagtaccggatatacctcatgtccccgtgcttcgctgtcgcaaccggaatagcaatacggataagggtattcttgattgacaatatcgagggtatttttggcgaagtctgccggataccaggtttcattcaggataggttcccataaccatacacaagggtgattgcggtcacgccgtaccaggttgcggatatcgctataaacccgttgtgcaaattcaggagcgtcattccagaattgccatcccggtgtgtttacaatgacgaacagccccagttcgtcacatgcatccataaaggcggggtcttgagggcagtgagcattccggatgactttcatacctgtgtcgcgtagctttttagcgtcgcgccaatgaatgctgttggcaacggcattgcctactacggcaaaatcctgatggcggttggcgccaatcagcgggcttggataaggtttgccgttcagccagaatccgtcctttcctttgaattctacgctgcggataccgatacggcggcggtagccgtccactacatttccttcattgtcgcggatacggacaatcaggttatataacgtaggcgtttcagggctccaaagcagaggagacttcaacgttattttatcttttgaagtgactgccttgcccggacgtacttgaatgacatcgttcagaaatgcggcttgtgtgccgtcgggttgctgaagttcatattctactactcctttgaagttctttttactgtcattacgtatatgggctttcaggattatttctgcggaagtgtcggaaactttgtcgtatgccacgaaaagcccgccgcctgccatttcgttttcgaaattgggatcggtgatgaaaaccggacgatgggctatgagccagcagtcacgatagatgccgccaaaataagtataatccagtacatcctgtgctttgccgggaggataactggggtcattgctgttgtctgcccatacagctatcacattgtctgtcccccaattcagtgcatcggtgacatcaatgactacaggcaggtatccgccaaagtgttcggtcaataaattgccgtttacaaaaactttgctttttcccatgatagcttcgaaatgcaggaaaagttttttgcctttcaattcatttgccggagtgaaatgtttgcggtaccatacctcaccttgatagttgatacatccactggcctcagtcggtacatattcaattccgtcgggcagggaaaccactttccagtcctggtcattaaagtcggtggtttccgcacctgtagcggttcctttgtggaatcgccatgccggattcatggaatatacttcacgtccggagtttgccagttcatagaaaccggcagtagaaaactcaggctggtaggctgcttgcatctcatagagaggaaatagcagcagggcgatgagataagataaaaaatgttgtttcataaagtagtgttgtattataaggttcatattattttttatattaaagtttcattcgttgtttcttatggaatgtttttctgtcgggcggtctgagagttcatccatgttcttgtcttccttatcattggaatttcataataataccaccagtcgctgttgttggttttggcggcaagatggttgtggtggttttggtcagcaatgtaaccgtcaggttgttccataaaacgggtctgtgaataggtctcttccaattgttttctcatggtctgaaagtcattgcacacttcatttatttgttgcaatgctgtctgtttgtcttgttcatgtatagtgatatcatagttgtgcaaggctagaatcagacggacagggaagttgaacaagtgatttgtctgttcgtatacctctaatgtatagcggttgcgtaaagcatgttgtttagcctcttttatgccttggcatattttttcatatcgtttttgttccacctttgcttgggctattttttgttggtaggtacggctccatgctcccggtgcgtctggatccggtaggctgattaaagtaaaatcagtagttccccatgccggattgcgccttcccgaattgaccagggcatcatcaaagaaaaatgcttcttgttccagttcatccagaaaagccatatggttgtcatttggatgaaagccaaattctcgttgggcatgtgcggctttgaaggcttcgactgtccgtgctgttgggttccagccatattctccctgtgcgatgtatccacgccacaccgtttcagagtgtggggaaccatcatcccatgctgtggccaaaattccttccagttgattttgagcaactaatttgctgaatcctttgatatagccggccagtgaattttcacgcggtataaatggagaactgccacacgaagcagcggtagctcccattactttcagtcctttgtcatgataccattgtaaaatgcgttgatgccccggttgggtggcatctttgtagttccatcgcatataaacacattctttggggaataatttgatgctttcattcaattttttatcgttccattttgctgctatttcatcctgggtttcattactgttgaccaaatcccatacaccgccgtattttaatggcatatcatcccagaaaataggaatgcggttgtgagctgttgcgaaatcgcatacttttttcaaccagatcatttgtagttcaaatggagtttttccggtggctttacagcgttggtctatgcctatggcggtaatttcatctcctcctatatgtaagtatttgctataaggcatggcttcgatagcatcccggtaaaggtcgaattgcaaatcataggtacgagggtcagatgggcaaaactcccagtcgctgtcggggttttcacgtagttcccaatgatgttttaaaataaaaccggcatgtcccaaaccttggaccaagggggttatttcaatattccgttctttggcatagcggcataaggcttgcatttcctgcttgctgatggcattgggggcacctatttcggggcgtcgggtataacgcagtttatcttccagctcccaaataactgcgtttattttgtatcgggccagtttgtctatttcctgataataatactccatgcggtctaaatgatgttttacatcaaagtgcacggcccgataggaaatggccggataatcgatgattagcatggctggaataagtatgttgaaatcccggctgtcttccattaattgttctaaagtttggcaaccgtagaagatacctgtcatggttctggctgatatacaggctcctttgtcattaatttccatcatgtatccttccggagaagcaggaacattctggctggtgagttggagccggatgggtttcccttttcgtgggcaacggggaagtttgttgagcatatctcccaatatggggatggaagttgtgtctgatgacagaatataggataactcccaataattgattccttttccagaagtcagttctatggattgtggttgtggaagcaactggaatgtcttgtctaattctcgagaagcaacctcttctatgaataagcataaacagagtaataaaagaatttttttcatatcacttcgatgattaattttttttctactaattttgttccttgtacagtcagggttccttttcctttttcttcgtcagattgtaataatactacacatttttcccgaaagcaacggcagtggggctgttggtatggaaacatatctgtagggtttccgttgtctacccccaatagccggagtggtccacttacgtggaaactgagttcattggaggcataaggacaaggaattccgtttttatctgttatgtcgatctctatgcgtatgacttcatccgaaccggcttttacagaatacttgttactggcaagggcgacagaatgaggtgcttctgcactttgataacagtctgttgccacgatttttcctttttttatgcctcgggcttctatttttccgggcgaataaggaactaaccatatcagttgctcccctgtataaggtttactgcccaaagatacattatttataaataactctactgcatcacagttggtataaatgactacgggaattgtttttccttcttttcccggatgcgtccaatgcggaagaaggtgtaccattggtttgtcggtccataaactttggtagagggaataggcgtctttcggaatggcagctatgtcgataataccgaaattgccacatcgttgaggccattcggcttcacctaaatagtcaaaactgccccatcggaattctcccattaaccaagggaaagaacaggtgcgttgccatgatttacgggcgctgatacgtacagaagcattgtcgtaggacgattgataatagggataatcggattcttcggggaagcattctttttccgtcaggtcaggtataggaaagacccgatgtttaaattgttcccagtttatgtttcctttttcccaaggagcggggaaatcccgtcttctccattgtgtctggcttcggtatacgccacgggtttgataagtgtggggtacctctgtagcaatggcacaaagtgttgggtagtttttgtggaagtgttctagttctcctatttcttctccatttccattgaagccgataatgtctagatagttgatttttttttgataatcggtcttcatacctctagtaggatcagttcctccttgagtgacagggcggtcagggtccagttggtgaaacaggctgaccaggttgtgttggatttcgggggtagctcccgttacttcgttgccgatactccacataatgatagagggatggttgcggtctcgttttatgaaatcagtcatatctttttgccaccattcatcaaagtaatttccatagtcatcggcggctttaggttgattccatccgtccaatccttcgtttagtaccatgattcccatcgtatcgcataaattatagaaagcaggagagaagggattatgactggtgcgtatcgcattacatcccatatctttcaataatttgagacgataatgaagtaggtcgtcgggtacggcggctcctacagcaccggctgtatgatgatcgcatactccttttatctttagtgatttgccattgagcaggaatccgctgaccgggttgaattctaattgacggaagcctacaggtaatctacattcatctagtatcttgttatctcttgtcagttggcatataagtgtatagacgttaggagaatcaggcgaccataataatggtttcctgatgctccctgacaggaagcaaagagaatctgcagatgggacaaatattttttcagaagtatcggctatgctaccgttgggagcttgtagatatgtttttactttgattggctttttctcctgtgtctcaatttctatagatagggtgtaggtggcagattgcttattttgtagcttggatctgaaatggattccggaataaggaatgtgggtggggttactgaccagcaggtatacaggacgatatattcctgatcctgtataccaacgtccggttaatgctttgctgtgatctacttttacagcgatttggttcttgccttcttgcaaatatggagttaaatcatatacaaagctgatatacccattaggacgtttgcccagccaatgaccgtttatccatacttcgctgttcagatatacgccctcaaataggatttgtacttttttatttttccatttggaaggaatggtaaaagtttttcgataccagcttattccggcaggcaggaaaccgctttgccagtcggttccgttttcaaattgtttataagtgccttctatgctccagtcatgaggaatgttcaatatgcgccattgagaatcgttatatgaggaagaagaggctcctttgcctgcatctcctagatggaatttccagcctttacagaaatttatggtttctccggcaaaagatgccaataagaaaaattgtatgcaaacaaataaaaggatacgtttcatggttagtgtgaagagaaagagaggctgaatgttgcttgaagaacaatcagccccagaactaatttactgatgttatatataagctaatacctgttgatttaccatccttcactaggcgtacaaagtggattggtgtcaagttctttggctggtatcgggaagtagttgaacttattgatattaccggatttgccagtctgatagtttttatagcgggtatcatcacaagtttttaatgtctgctctaacaatccccatctgcgtaaatcgtagaaacgttcgccttccacaaagaattcaatggcgcgttggtgtaccagatcttcaaaaaccccttctttggttattgggccgctatagtcattcaggttggcgcgtcggcggatttgattaatatatccgatagatgtgtctaaagcccctttgttcatataggcttctgccagcatcaataatacatcggcatagcggatggctctttcattgatgaatgacttgggaggtgccggttcatctttttgagtcttccagttctgatatttcaaaatccagtatgttttttccacttgtcttgtgcaaaaacttcccggaaaggtctttggtagtaagtgcatccctcatagtcccatgccacagaacagcgggcacgataatcaaaattgccgtctttgtctttttccttccagaagatatccataatttgctgggtaggatttgcttcataccatcctccgacttcagcagcggcatattctttagggcgggtattggattgggtggaattgatattttctccatctccccaaagatctgttccacccacatcttctatcaataactcgaaaatactttcggcattgttttcatgagtgtcatcaaaattccaattaaagtcctctactagtttgtaggtgtaaggattctgcgtcagaggctcgaggacgtttatcgcttcttgccaattttcttcatagacatatattttacccaaagcggcataagcggctccttgtgtaggctttcctattttattcgttatgggcaatagggaagcagcggtttttaaatcttctttggcttgtgcccatatatcagcttgtgatgattttgctaaagggaaagtcgagggagattgggaggctgtcaggcggagaggggcgtctttaaactctttggctaactggaataaatagaagccacgtatgaaaagacattctccttttaccgaattttgaaaatcggtagaaaattgttctttcttttcttccagtttttgcataatggagttggtacggtacaaggcattgtaaaattgatagaacatgccttgtgtcagtgagtttgtattactattagtaaaacggtttactgtatatacatccgaaatatcgttgcggaagtcgacttcatcggctcgggctattctcagcattacaccgcgagttccataataaccgccgtttagggcattcttcagtggagtatagcaagaggtcaaggccagattgaaatcggtttcatctttccaaaaagtatcttctgttgcttggttgggattggcctggtttaattgatcttcgcaggaactgaatagcatgcctgaaatcaatatggtcaatgtcgttttaatatatgttttcataagatgttcatttttagaatgttacatttagtcctaacatgaaagtacggttagtcgggtaaataaaattatcaaatccccgataattggcattgtctgcattgacatccggtgaatatccgctgtaactggtgatagtaaataagttttcagcgttaatatacacacgggcatgctgtatggcacctttaaaccatgtctgaggaaatgtataacctaattgaacactgcggagacgcaaataagaaccattttcaagataacggtcggattctgcacgggtattacggttaggatcatcccatgtcagacgtggatgggaggcatttttgttttcaggagtccaataatccaggcaacttgccagaaaattggaacctttggttacatcttctaatgtctgacgggttgcattataaattttatttcctaacactccttgcagtccgattgataagtcgaaatttttgtatctcatattaccattcagcgcgaaagtaaaatcgggaaaaggactgccttgaaatacacggtcgtcgtcattgataacgccatcgttgttggcatctacaaattttatatcacccggttcggcggctggttgtatttttttaccgtctttggcatatgcgtctacttcttcctgactattgaaatatccggctgtagggataagccaataacctccaataggatatccggctttggtttcactggtagtgatgttttggttggtagaaccgcctttgatagatccgctttcacttcccatggctattactttgtttttattgaaagacccaattaagttgatgccatacgaaatatccggattgggttggtccatccatcctaaattgaattcaaagccattgttacgtatcttgcccgcattgcgtatagggtcattggcaccaccggaagagataggaataggaacggtcagcaagatatcttttgtatttttcacataatagtctgctgttaagcttagtcggttattaaaagccataaaatcaatgccgacattagtcatagcggtttcttcccattttatatccggattggcaaaatttttaggaaatgctccttgaagcagaccaccgttgccatcgggataattgatgccggtagtgatggtggaggaatattgatagttatcgatttcttgatttcctaaaacgccatatccgccacgaagctttagctgatcaagccaatgcacgttttccatgaacttttcttcggccacattccatcctaatgaaaaagaggggaagtaaccatatcgattgttcttaccgaatttggaggaaccgtcccggcggatagtggcggtgaataagtatttattttggtaggaatagaatacgcgtccgagaatagaggtaaggacacttctccatgaattgccttcgttgctgcgattggttgtggctgcatctatttcttctaatccctggggtaatccttcaccataggcttgtatgtggcggaatctgctgtcttgataggtataacctgccaatgctgaaattttatgctctccgaacgtacggtcgaaagttaataaattttcaacaagtatattacgtctccttctttgtctttctgttaattgggtgatgctgttggtcgctaatccaaaatcatatttattgagataattcttatatctttcgaaagaaaagtctggagttaaattcagtttgtattttagtcctttaaaaagttcaatttgtgcatacaagttagcgaatatttttacattttcgttataacggtccatgatgttgtcatcaataatggccaatgggtgaggaatgtttaccacatcaccatatgtgccaccatatccaccttcacgagtatcatcatatttttccaaagtaggaacactttgcagaatggtgccaatcatgccgcctcgaagttcctggtgaaggggcttgtcatgactgaatgaaataatgagatttgttccagcagagaatatccctcttttataatcattcttggattggatattataccgttggtaattggtacctattacaataccgtcttggttgaaataacctaagccggtgtaataagtggaatattttccaccaccttttacagacaaattgtagttttgcatcagtgcggggcgaaacatgatgtcttgccagtcattgtctggtttgttagccagatcggtagccatgtctaatgccggtttgccgatagcttgacgggctatagtggtaacttctgcccatcctttggcatctagcatatcaagaaatttgctggcagttgatatacctaagttgacagataaatcaatgataggttttccttctgtgttacttccttctttggtagtgacaatgataacaccgttggctgcacgggaaccgtagatagctgcggatgaggcatctttcaatacgtcaatgctggcaatatcattggggttgatatgatcaatactgttcatatacatgccatcgacaatgtaaagaggggaggcgttgtttagcgtaccaataccgcggaccatgatacgggttcccgaacctggggcaccaccttgagatacgatgtctacccctgcaattttgccttgcagcgcctggccgatgttggcgttactttgtgtatttagtttttctgtgttaatgtttgcaacagatcctgtcaagtctgcttttttctgtacaccgtatccaatgactaccacttcatcaagagtttttgtatcttcttttaatagaaaacggatacttttttggttgttgataaccgtttcttgtgtgaggtaaccaatgtaggaaacttcgataacagattgtggttcggcttcaatactgaagttgccatctatatctgtgattgtacctgttgtggttccctttatacggatgttggctccgataatgggttctccgttgacatctgttaccgttcccgttactgttttagcttgttgttgagcatgcaagtctttaatagcttctgtagttaaaataatgtgtgtaccttccagttcatagttgataccggtccctgacagaattctgtccagtacttgtgctacggcttcatttttgacctttacggaagtaattttgttaatatctacttggttattgtagataaaaagataatcagtttggttttcaatttcattcaggatcttatccagtttaacattattcatacgtatgctgacttttgcattttgagaatgggcattcccagcatacgaacagaacacacagaccatcaataggaaagtggaaattctcataattctaaagatttgtttaaatcggggatttttgaagcaatatctccccgacaaagtgttatttttcatacctttgcgttgatttaaatagatttttttacttgaaaaattgttttgagtctatgccggtaagtgcggcaacacttatcggcatttttctttttaaggttaacttgagcttttcttcataggcttgttgtttttaggttagtattgtctggtcaattgatgtaaataatttcttcatcgttggctctttcatatttaaaatggatatccctttgcagcactcttaatgcataatcaataccgtctgcttgacggaacttgccattataggaatatttcaatacctttttgttattgatgatgatacggataccataatatttttcaaaatcttccatgatggtctggaaaggttcatctttaaaacagatcaaaccttctttccagcggtaaggagtgaaatcgtttactttggtaactgccaactgcccgtcttttacatatgctttatgatgaggcttcaaggttattgtctgttcgggaaagtgctgtgaggtaacttttacactacctttcattaaagttgtttcaaacaccgtttggtcaggataagcatctacatcaaactgtgtacccaaaacttcaatgtcatatttgtctgtccgtacaataaaaggagtttttttcttcttggttacatcaaaataagcttctccttttaaaaaaactgttcgttgcttttggctgaaagtgaccggatattgtaaagtggtacgggcattcagccatacattagttccatctggtaaagtaatattggtacgttgtcctgccggaacagatactgtattcatggcaatgacttcattttccgatttatattcctgatataaatagttaatggtaagcgtcagtatgatgacggaagctattttcagccattgacgaataattttgggaattcgtttggtggaaatgcagttatttgtagtttggtcatcatgcaccatgagggcatcgaacaatttacgctctttgtaaaaaatgcgcttgttctcttcggatgcttccatccatgctcttatgtccatgccttcttgtatagaagtagttccggcaaaaaaacgatgtagtttctctttttccattttattgcattcttttatgcttctatataaacagcacttcagaatggaaaattcctagtggcatttcataaaaaaatagagaaagagtggaaaataatcttttaagttagtctgaagcatctttaatgccttgtttatatggaaatctactcctttgggggtgatattcatgagaactgcaatttccttataggatttgttttcgtatcggctcaacatgaagatagtacgggttttttcgggcatgtcggtgagggtttgttggacgagttcttgaatttcggaaataaaaagctcataaggttcgcatgcttgtaaagtggcgatccgggtattcagttcccattcatagtaatcttttattttatccgagtattcttcatgaatttgctgatgacgcagataattcaggcatttgttttttataattgttaagatataggctggaatattggaatcttcgcttaaggattgcctgttttcccaataatacatcatcgcctcaatagtaatatcttctgctgtggttaaatctctgacataagtattggcgaagcgtacaaaacgtctttgaaactccttgtagagttggttaaaagaggtaatgtcttctttatagtgctttatctggatggggtcggtcatcttatgcgttgtttgattcatgattagtacaaaaatacattttttttattagtactacaatttttcgaatgtgaaacgtatgaatcacctgtaaaaatatggagagtgtagggggatatgcttattttgtatcagaaggtacgctttccgctgacccgaagttccttttctttttctttctgaaaacatttttttatacgtttttcgagttcgaaaacgtataccgttaatgaattcaattattttttgtccgacttttgtccgactgttttaaaagtaaagaggataaaagattgtgattcaatcatttatcctctttttagttgcggaggcctgactcgaacagacgacctttgggttatgagcccaacgagctaccaactgctccactccgcgatgttgtgttttgattacgggtgcaaaggtacggctttttttctaatctccaaattatttctgcatctttttctcaaataaaataatctttttatctaatgtgttgatatatagagtgtatgtaatatgttaattaacatttactttaagattatactttatttgtttgtgtggtacaaagaaaaaatgtaattttgctcacatatatatgtaatgtgcaattgaacttatatggcagtatcaaagactagggctaaattggtagacgtcgcccgtcagctttttgcgaagaacggggtggatgatacgacaatgaatgatatagcggtggcttccaagaaaggaagacgcacgctctatacgtatttcaagagcaaagaagacatttatatggcagtggtggagtcggagttagagatgctgtcgggcgctatggagaaagtggctgaacaggatatcgctcctgatacgaaaatactgcggctgatagaaacacatctggactctatcaagatggtggtgttcaggaacggaactttgcgtgccggttttttccgtgatatatggagagtggaggcagtgcggaagaattttgaccgaacggaaacaaagctgttcaggcaggtgttgacggaaggaaaggaaaagggaatctttgatatagacaatgtgaatatcgtggcggatattgtgcactattgcgtgaaaggaattgaagcgccttatatacgtggtcagataggtgaggagctggacgatgagacaggatgggcatacgtggcaaaaattgtgtatggcgcattgggacgcaaagaacagaataaggaataaaattactttataattataaaatcaaaaattatgggattattaacaggaaagactgcgattgtgacaggtgccgctcgtggtattggtaaggcgattgcattgaagtttgctgccgaaggagcaaatatcgcttttacagacttggtaattgatgaaaacggtcagaatacagaaaaagaaattgctgcgttgggtgtaaaggtgaaaggttatgcttctaatgctgcgaattttgaggatactgagaaagtggttaatcagattaaggatgattttggttctgttgatattctggtaaacaatgcagggatcacgaaagatggcttgatgatgcgtatgagtgaggcacagtgggatgcggtaatcgctgtgaacttgaagtctgcctttaactttatccacgcatgcactcctatcatgatgcgtcagaagagtgggagcattattaacatggcttctgtagtgggtgttcacggaaatgccggtcaatgtaattattctgcttcaaaagccggtatgatcggtttggctaaatccatcgctcaggaattgggttctcgcggtatccgtgccaatgccatcgctccgggattcatcattacggatatgacagccaaattgtctgacgaagtaaaagctgagtgggctaagaagattcctttgcgtcgtggaggtactcctgaagatgtggcggatgtggctactttcttggcttctgatatgtcttcgtatgtatcaggacaggttatccaggttgacggcggtatgaacatgtaatatgatagttgtttacgaggataatcatattattgtagtcaataagacttcttctgaaatcgttcagggagacaagaccggtgatactcctttgtcggagatggtgaaacaatacctgaaagagaaatataataagccgggcaatgttttcattggggtgacccaccgcttggatcgtcccgtcagcggattggtggtgtttgccaaaacgagcaaggcattgcccagactgaatgagatgttccgtaacggtgaggtgaaaaagacctattgggcgatagtgaaagagtgccccaaggaaacggagggtgagctggtacactatctggtacgtaacgagaaacagaataagtcttatgcatacgataaggaagtaaaaaattccaagaaagctgtactgcattataagcttatcggccattctcagaattattatttattggaggtggatctgaaaaccggaaggcatcatcagattcgttgccagttggccaagatgggatgtcccattaaaggtgatttgaaatatggctttccacgttccaatccggatggcagtatttgcctgcatgctcggacggtacagttcgttcaccctgtgtcgaaggaaatgatccagttgactgcaccggtacccgaaggtaatttgtggaacggctttgagatggattaaagatagaaaacaaaaagggaatgcttcacagcattcccttttcttacttttaggcatctttcatttacttcaaaacttctccgctttcgctgaaaagtacagtgctttcagttccctcttcatcagttaaaacaaccttgtaagttttagttccatcttcgttcgcttctacggcagcttctttgatagtagattctgcatagttctttgtgatagcttcctgcacggcagccggaaggtctttcacttcaataggggtaaagtcatttatcatagttacggtcacagagtccaccataaagttgtcggcgaatgctgctgatgttcctaatcccattaccaatgctgctgcaacaaataactttttcataattgtaggtttttactgttaatactatgttgtttagttttctctgataacagaaaaacaatatctgtgccaaaaaacgggattgttttttaaagtgctgatatttagcaaattgccttcgattgggatgaaaggaagatgggaaaaagtgtggaatatggggaatatcttgtggaattattccacatggccgatgggggaatggggtatatactgtaaggttgtgccctactggaacagcaggggtaacagccttacggtacagtagggacattcattaaatattacaaaatcagccaactaattcatacacaaagtattgcgaattagttggcttttttgtatctttaggtattcccccgaaaataaggtttgacggccaaaacgggggaaatatccaaactaataagatatggcaaagatagtgaatatttcagaaattcaccctactttgggttttacagaatttgatattctggaaaaataccgcaagagttttaatgagagtgagcttggcaagcttcattcggtctttccgtttgaatgtatggcaaaagccgccggcctgtcggaccggcgcctgggacgcaggaacagattcagtccttccgcaaagatcgcccttatggtcctgaaggcatacaccggattctccgacaggcaactggtggaacatctgaacgggaacatacactaccagattttctgtggaattatgattcccccgtcccttcccataaccaacttcaagatagtcagtgccatccgtaatgagatagcatcccgccttgacattgattctttccaggagctcctggcttcacactggaaaccttatcttgataaccttcacgtctgcatgaccgatgccacatgctatgaaagccacatgcgttttcctacggacatgaaactcctttgggaaagcctcgaatggctctacaggcatatatgccggcattgcagggagctgggcataaggcgtccgcgcaacaaatacaggaatgtggcggaatcctatctgtcctactgcaagaaaagaaagaggagagcttcaaggacaagaatgcttaagcgccgtatgatcaagcttcttgaaaagctcctcagtcaaagggatgggatccatagcgagtacggtgctttactccgatatacccaggattatcataagcgtctttccatcatcagaaaggtgcttgtacaagaaaaggaaatgtttgaagggcggaaagtcagtgaccgcatcgtcagcattgaccgtcattatgtacgtcccatcgtcagaggcaaggaaaccaagtccgtcgagttcggtgcaaaggtcaataatatacagatagacggcatatcgttcatcgaacacctctcgttcaaggcattcaatgagggtatacgcttgaaggactgtatccgtatgcagcagaagcttatgaatgtaagggtaagatgtgtggctgccgattccatatatgccaataatgccaacagaaagttctgtacaaaatatgggatatccacatcctttgtgcgcaagggaagggcggccaaagatgagcctttgaggaaggtgcttagaagcgaactctcaaaagaaagggcaacacggcttgaaggaagcttcggcactcaaaagcaacattactcgctctcaaggataaaggccagaaacaggaagacggaaatactgtggattttctttggaatacatacggcaaatgccatactgataatagaaaaaatcagaaacaaaacagctaaagcagcatgatatgattttactcacagaatcagaagaggtcatcagacttcttccggaacgtcatgtcctgtcggatagaagtatgtgagaaagcacggaaaaatgacaataagaatggcatatgaaatggtcatgccctatcatcttcatatgccatcttattttttagagacatttactgaatatccctacagtagattcttgttggtaaagttattgaatatcgtacagcttcaatttgttatataaagttttccggtctatgcctaataagatggcggctttacttttattatttcctgtttgcttcaatgcctcaaggatacgtttcttttctgccgcttcatcatgcaggctgaatgtctgcggaccggcggaccttataggttcctgcagctcataacctaattcggcaagggtgatgaagttgctctgtgccaatagggtggcacgttttactatatttttcaattgccggaggtttccgggccatgaatacgtttgtaaagcttggctggcagcggtatcaaaccctatcagctggcggtccagttctctgtttgcctgatccaaaaagaaattggcgaatagcaggatatcttcttgccgctcttttaatgccggcatacgaagggtgaattcattgatgcggtggtaaagatcttcgcggaagtttcctttttcaatggcctgttgcaggttctcattggtagcgctgaccagtcgcacgtctacctctatttctttattggagccgaccggacggatacgtctttcctgcaaggcacggagcaactgtatctgtacttcataacttaagttgcctatttcatccagaaacaaagtacctccgttggcttctacgaatgctcctgttttgtcgtttaacgcccctgtgaaggagcctttgacatgaccgaaaaattcggaagccgccagctctttggggatagaaccgcagtctatggcaatgaatggcttgtcggcccgtttgcttagctgatgaatacggtgcgccacatactctttacctgttccgctagcaccgtttatcagcacggacatgggggtgggggctaccagacctacataattgtagagttggcgcgctgcctcgctttccccctccagaaaattagagggaggaacggttgcactgtggggaacggctttgttcttagatgctttgggcgcgactgtgttcttttctattcctaccggtgtgggtaaagctttgttttgcaatgcctcattaattttcttcagcaactcatccggttgtatcggctttgaaatgtaatcactggctccatgttttatagcctgtacagcgctttggatgtcagcatagcctgtcatgatgatgagtgggatgttatatttctgttctttcatccatgaaagcaagaagataccatcttgatcaggcaggcgcagatcagacaaaacaagatcgtatggttgtgcatccagttgtttgcgtgcgcgcgcattactgcttgctgtatcaaccgaaaatccttttttacccagccaagttttcaacatggtggcaaaagtcaagtcatcttctactatcagaatggaatgtggcatctttatgtggtttttattcgtgcaaaaataagcttttttcacggtgtaccgaaacacggactctatttctaataccttttaacttaacagggcttaattcttcatgcttcattcggtatttcgatctgcttttttgcttcgtcaattactttttctatttcttctattataaagtttgttttctctatcgcttcttcaccgatttcggttgtccctcgtctttgttccatccatgtcagtgcaggaatgcaacgggtagctcccagcatggtgaacagtggcaacagtttatgagctattgccgtgatgtcttccatattctttttcgccaatgcttcttccatacactctcggttcttttttgtttcgctgatgaaggtacggagtatttctgaggctgcttccggatcatcttccgagaaggcggtcagggcggagaaatccaacgtttcttgttggggatgattttctttggccggtgctatatggggagtcggatttcctgtggcgggtacatcctttcctgtgacctggaagatggctgtaaacaattcgtttatggtgaaaggtttgtgcaggcaaccggcaaagccatgtgaacagaaataattttcgtccatatcgctacgggcggtcagggcgatcaccggcagggtttgcacccatgatgtgtccagcgtgcggatggctttcaataagtcgaatccgttcatggcaggcatttgtatgtccgtgagtaagacgtcgaagcgcttttctttcaattggttgaggagctcttcgggatgatggcagcaggtcacagtcactccggggcgttccagcatggcggtggtaagctgtaactgtatgcggtcgtcgtcaattaaaatcaggtgaatcggctcactgtcttcgcgtggagtgtctgtttgccggatcccggttgcgtcaggggaagcaggagtatgttctgctcccggtccggaaagattttcatccggatgggaaggaccctcaggcaaaggcagatatacatggaagcagctgcctttgtcttgttcgctttctatcttgatatccccttcgagcagaagcaccagtttacgggtgatggccagtcccaagccgaatccttcttgtccttgtgcattatggagccgggtgaattcctgaaagatacgttgttgctcttcttggctgataccgcatcctgtgtcactgatactgaaatgcaattggccgttttccaatgctgcccgcagggtgatgcctccttctttagtgaatttcagtgcattggatagcagattctccgctatttggcggatacggaacgggtctcctatgtatacgcggttcaatgattcgttgcaatgatagttcagttccagctgtttggagtctgccatcggtttgaagctaatataaatggtgtcgaacagttggtgggggttgaacgatacctggttgacgtccattttatgtgcatccagccggtggtaatccagcagggatttgaccaggctgagcaggtgattggctgaactctgcatattgttcagatagaaacgctggcgttcttcggtagtgatccgctccagcaggtcggtatagcccaagatggaacccacgggagctttgatatcgtgggtgatggtcagcattagtttttcacgcgccgccaataagtcttcggcgcgacgtttggctttttccagttctcggcggtagtggttgctgcgagtgatgtctctccatatcaagaccagaaagaaaatagccagaaccacagcgacaatggcgattcccgccactgtgcggatagagctttggcgaatatattcctcttgtatatgtttgttttgggccaaagcttgctcttcttcctctatagtacttaatagctgattgactttctgacttagtttcaagccgctgaggcgcagggactgggtgcggcgattgaccatttccatacgttcttgttgggtatcggttactcggctctgtatgtttttcaacatggtgaccacagtatctgccggactgtatgcctcggtcagcgtatcggtatattcttcctgaatcacattgttgacctgtgtggaatctgcttttccgggcgagaacacttctcccaaacgtttgaagaagcttttgggctttttacgaataatataagaattggtgtgtgtgattactttttttcgtacatggggaaggctgagcaaggaatcttgctgggcgatcagttcgtctatatgctgtttgtaaagtatatctgtcccaccgtcctgaattgctttcagcaggttgcgcatattccgttctttatccatgaaaagcattcctacggtatccagtcgcgccagttgtatgctgtctgtcagcaacgtgcgtagggagtcaagtgccgtggtggcttgtttcatggctcgttggtatcggtagtattgttctatttgtcccgtactgagcgattgtccgatgacttccgcctgatagagctggctgataatttggttggtgacatggcgccgttggctcaggatggcttcatcatcaccggttccggacagtgacttcatttcttgatagatatatccgatagatataaagagcagtgcagtcagcagaatatagccgaatgcaactttcagcttggtggaacggttgggcaggctcatggtggttttatttttatttcgtatcacggttaaagcgcaggtaatagagtattccggctgtagtcagtccgaaaggaaatgccatccatattcctatgattccccaatccatgatgaaaccgaaaaaatagccggcaggcagggagataaggaaataggcgatgaatgcgatatacatcatgggtttcacatctgcgattccacgaagggcattggcgaaatttatctgtaatccatcaccaaactggtagatgatgaacggaatgataagttgtgctaccattacgctgaccgccggactgtcgctgaaccatcctcccagttcgttacgcagcaggaagatgggcagggcgcctatcagtgcgatgagcagcatgatatggaatccggcgtatgcagagcgcctgacgttcatccggtcattctgtccgcggaagttgctaacccgcacggcaacggctgctcccatgccataatacatcataaagcagatttgggaaatggcgagcatcacttggtgggccgccagagcagtagtcccgatccatcccaccataatggcactgagactgaacgaagcagtttccattcccatctgcatggcaatgggccatcccagtttgttcaggtgcaggaagtctgcccggttgagcgtattgtgtagaaagccttctttataaatatgataacgtcgggtacagaaaaaaatgacggcgaacacgatcaccatcatgatacgggaggccaatgtggaaattcccgctcccagcaatcccatttcgggcattcccagtttaccgtaaatcagaatgtagttgccgataatgttcattacatttcctgtcaataagatccacatggaaacgcgggtatcggttatgccgtcggcaaattgcttgaaaccgttgaaaagcagtacaaacaacaaggatatcagcaaaacgatgaagtagggacgcattaaaggcagcagttcttcgggttgccccagtcggtggatattcagataaagtatccacatgatgagtgtgagcaatacggccagcagtgtgttggcaaacaggctgttcttcagcattcgtcccactacatgggtttctccccgtccgaacagactccctacgataggagtcagcccgtatgagaatccggtagcgaaaataatggccaaagtaaacatattgttgacaaaactggcggcggctaattcattcgtgctgtgatggcctatcatcaatgtatcggcaaaacccaaaatgatgacacctatctggccgataacgatagggatacctaaagtgaaaagtgctttgtaatgttgcatggttaataaattgctaatgtgccaatatgctaatttgccaactggctgcgctgtgttccgcatggcgcagccagttggcaaattagcacattatcaggtcggcaaattacttttatagtagagtgtggaacaattttctcgcacaaatgttttttgtgcagcttcttttatctggccggcagtgaccgagcgatatttgtttacttcattgttaatatcttccgctttgccggtcagttcaaaataagccagattggtagccacattcaggtaattcaggttattgaatatctgttcactttcatagcggttctttactttttccagctcgtcttcatccacactttcttccgtcaatgccttcagttcctgccatacggcagcttcggcagcttccagcgtgacgcctggggcgggtttgccggtgatatggaacaatccctcgtcaatgctgcccgatatataggcgtcgatactgttgaatacctgtttctcttgtaccagatgctgcaccagacggcaggaacgtccgctgctcagcaagtcgcttagcatatcaaaagcatagtagtcgggatggcgtcgttcacagatatggaatgccataaagagcgcgtctacaggcacgttccgctctactgtcagtcggcgttcttccgtttgccggggttctgccggcagtgagcggggggctacgttgcggcgcgggatagggccgaaccacttttcagccaatgtcactgtctcttcaaaagtaatatgtcccgttacagccagaattgcgttgtccggtgcataatatttaaagaaaaaggcttttacctcttcaagggtggcattggctatgtggctgatttctttaccgatggtaggccactggtacggatgcaccttataagctagggcgcgtagcagatgtgaggcgtctccgtatggctggttcaggttccgctgtttgaactcttcgattaccacttgccgttgcacttccagactgcgcgggttaaagtcgagggataacatacggtcactctccagccagaatccggtttccacattctgacgagggagggtgatgtaataattggttatgtcattatttgtccatgcgttgttttcgcctccggcattttgtaccggagtgtcatagtcgggcacatggacggagcctccgaacatcaggtgctcaaacagatgggcgaatccggtatgatcaggatcttcatcgcgtgcgcccacatcgtacagtaggttcaatgccaccatctgagtcgtattgtcctcattgtgtatcacacgcagcccgttggacaaggtgtatcggttaatgttaatcatctgagtcgcaaattactgaatacttgccttgagaatccggatattctctatagggcggtctgcgcggttcgtttttgctatttcaatattgtccactacttccataccttcggttacttcaccgaatacggtataagaaccgtccaagtggggagcgccgcctatggtgctgtatgctttgatctgttcgggggtgaagcggaatttctcttctttgtccgccagctcacgggcttgggcttccaaggtgtcctgtaattccagtaatccggcattgtctcccgccttgcgcatcttgtatatttccttcatgtgctggcgtgccagactgtcgaatagagcctcttcacgctgttcgtttattttgttctccatgcccagcaattgcggttcggtgaacttgcgtccggtaacaatatagaactggcaacccgatgaagccttttcggggttcacatcatcaccctggcgtgctgccgccaatactcctttcttgtggaagaatttcggattgaactcagcgggaatggtgtaacccacatcaccgctgcccagcatggcagtatccgatgcgtttttgctgtccggatcgccagcttggatcatgaattgtttgataacccggtggaacaatgtactgtcatatactccttcttttaccagtttgataaagttatcacgatgtttcggcgtttcattatacagggccactgtgatatttcccatggtggtttccagttttaccaaggtacgcttttcattttccatatgatgatttgtttgtcttttcgagccggcgttgcatgcagtcaatgcaatgaaggctaggcatattagtaaaattttgtttgaagtcatgagctattttttatttatcggacaaagataggaaataaaattgagagtaagagcggaaaagcgaagaaaggaaggataaaaaaagggagagagcggaggaatacttcagacgcagacgcggcagaaacaggtcttttttcctcacaaacgtgcgtgttcttataatttgtagagaagaaaagtaaatggggcagagtgaggggaagagaagcaccggaaagagaaaagacgaaagaaaatagataaaaagaccggcggcaaaaccggaagatgataagacttgaaaaaagaaaattaaaaaagtttctgaataacatggtttgcataagtcttgaaattcgcattgaatagtagtatggcatccatcgtttcagagggaagtctttgatgaaggatgccggatttatatcatatttgtaatatgcgcgcacgtgtgtgagaaaaaggaactgcgtctacgttggaagtagcttccgtcttcttggaaatctgtcggcttgtccgtattgttcatattatgggaacagacgggagagctgaaagatttaaattttgcgggggtaagattatagatctttcttagtggcaacaggtagtccgtaagttcttttttaataaattatgggaaacaaaagataaaagctgcgttctttcaaccattatgccgataaaattgtttaaatttgcaggaatacttgtacagacactcgatgaagaaaaaatatgttcgttggacattgtggacgatagcatctccgttcattctgttcatcattttatgtatattgatttatttgccacctattcagaattttctggtggacaaagctgctgtatatgcctcggaagctactggtatgaatatctccgtgggacgtatctctttgtcttttccgttgaatctggtggtgaccaatgtagatgctgcttccccgcataatgatacgttgctcagtgtacgccgcctgcaagtgaatgtgcagttgctgccactgctgaaaaagcaggtagaagtggatggcatatccctgcaaggagccacagtgaattctaatgacttgatacatggcatgaaattgaacggtactttgggggaattgttcatttccagtcatggagtggcactggaccccgaaactgccatcgttaacaaagtcttgttgaaagatacggatttatctctttgcctgaatgacaccgctgcggccgatacggctgcaagcgacaccacctattggaaaataatattgcaggatattgatttacagaatgtatcctttgcgctggatatgcctttggacagcttgtcattggcggcttcgctggataatgccatactgcgcgacgggctgatagacttgcataaatcggcctattcgctgcaaacgtttcggatagagaacggacgtgtgcgttacgataacgggaagccgctggctgccgacagcctgtcctccggactggacccctcccatattgcactgacggatatcggtgtgaaactggattccctatactacggaggtagaaatatgaaagccataatcagccagtttgtgctgaaagagcgttcgggagtggaaatcgtttctgccacagggcggatggtttccaatgacaaggtgctgcgtgtgccttcattgaaactggaaacccgggattcttatctggaactgaacgctgcgatggattggaatgccttggattttaaggatgaaggcttggtgtccgcacggctgatggctgatataggaaagccggatgtggtgagattcatgggaagtatggatgaaaagtttatccggcagtatccttccgaacccttgcgcatccgtacagggatcgacggtgatttgaacaagctgaaactgactacgctgactgccgagctgcccggtgcattgggattgttcgcccggggggagctaacccatctgacagacagtctgctgcgcgggggggatatcactttggaagctgaaaccaaggatttgaagtttgtttctacgttggctgaaggaatagaaattccatacggaacgcgcttggaaggcaaatttacgatggcgggcactaaaatgggcacggacctgctgctgatgcagcccgaagcccaggcggtggttgcggccgatactattcctataacggtttataatgacagcatctccgtagcggatgatttcaagatggaacgggcagcccgtctgtttgccaaatacgacttgtcgcgtgacaggtatgaggcagacttggctgtcaatcattttgacctgcaccagtttatgcctgccgattctttgtacaccttgtccacccgtctgaaagtggagggggaaggttttgactttttctctccccgtacttatttcaatgcggagggcggcatagaccgtttccattatggcagttatcatctgacaggaatttcattggctgccggactggagaaatcaaaggtgcatgcttcactggcagtgaaaaactggaccatggatattaaggcgcatttggatggtatcttgaaacctcatgatgtttcgggcgacttgaaaatggatgtggctcatttggattggcaggcgcttcatctgatggatacccgttttcagacctctcagcacctgggtgtccgtttcagcagtgacctcagaaaaaggtatgtcgtagaggccgagatgacgaatgccacgattgtcactgccaaacgcacttcccattccaaggacctgtttgccggattcagcacttccagagattccacttttgcttatctgcgtgcgggggatcttgatttgagtctggaaggagcagggcacatggaatacatttccggcagggcggatttgctgatgaagaaactggcggaacaatgggaaagcaaacatattgaacaggaggagcttcgggaatttcttccgggactatgtctgaaaatatcttccggtcccgataatccgatagccaattatctgtcaatgatggggttgtcatacactcgtctgtttatggatgtggattcatctccggcagagggattgaacggggaggcttatttatatggattgcgtacagacagcctgactttggataccatttatctggatgtacagcaggacctgaatggcataaatatgttgagcggagtggtgaacggacccaaaccgggacaggaggcgtttgatgtgacgctggagggaaatgtgggaaacaacagcgcccagttgttggttcaatacctgaatgcccgtaaagaacagggagtatatatgggagtgatggccgacctgcgccgccacggcatacgcatgaaggtttttccggagcatcccacgttggtataccgtccttttaccgtgaataaaaataactatatttatctggctgacaacgggcggattcatgcaaatctggatttgcatgacgagcaggggaccggactcagtttctataccaatcgggaagataccatagccaaacaggatatgacggtggagctttcacgcatcaatctgaaagaattccggcgtatccttccctatatgcctgatatggaaggatggatcggagcagaagcgcattatatagattccggtccgtatatgatggtgagcagtgatttgcgtatagatgaattcaaatatgaaggcagtgcgttgggaaattgggaactgggtggtgtgtatctgcccggtgaggcaaaggatcatcatctggatgcctatatacgccatgatggtgaggagatagctcatttgggaggtatctatctgcccgcggaggaaggaacgggaagcctgagcgcggatatagccttcgaacattttccgctgaatgtcgccaatccgtttgtgcccgaccgcatggtggaactggacggggatattgatggaacattgtccatgaaaggtgatccggccaaacccttgctgaatggggaactggcattggattccgtgactttcttcatgccggagatgtctgccatgttccgttttgataatgaaccggtgcaggtggtgaacagtaagatgatgttcaaggagttcgatatattcaccaaaggcaagactccttttaccattaacggcgaggtggatttctcggatttggaacggacggcagtgaaccttaaaatgcatgccgagaattatgagttgctgaatgctccccgtaccaagcgggctatggtttacggcaagatgtatgtggattttaacgcaacgctgcgcggtcctgtggaggaactggtgatgcgggggaacatgaacatattggggaagaccaatgtgacctatgtcctgaaagactctcccttgacggtgaacgaccgtttgggggatatggtgacttttgtcaatttcaacgacacaacttcggtagaggagtcctctgtccagcaaatctctttgggagggatggatgtggccatgaccatgcatatagaccaggcggtgcaggcacgtgtggatctggtgccggacggctccaactatatgttgctggaaggaggcggagacttgtcattccagtacactcctcagggggatatgttgctgaccgggcgttattccttgatgagcggggagatgaaataccagattccgattattccgctgaagacttttaatattcaaaatggcagttatgtggagtggacgggaaatatcatgaatccgcaactgaacattaccgcgaccgaaagggtccgtgcttcggtgggtgaggatggaaagacttcgcgtatcgtcgggtttgatgtagggatcgctttgagccagagtctggagaatctggggctggcgtttaccctttcggctcccgaggatgcgtctgtgcaagaccagctgaatgccatgtcggtggaggaacggggaaaactggctgtcaccatgctggtgaccggaatgtatatggctgaaggaaactctacgggaggatttaatgtgaataatgccttgaactcattcctgcagagcgaaatctcgaatattgccgggaaagcacttgatatcaatgtgggcatggaaacggtggatgacgccgatagcggcgggaaacgcacggattataatttccagttcgccaaacgtttctggaataaccgcttccgtatagtggtaggcggtaaagtgtctaccggaagtacggtacagcaggatgaaacctttattgataatgtatccatagaataccgcttggacaacagcggtacccggtatgtcaagctcttccacgacaagaactatgagagtgtgctggaaggtgagatcatagagaccggtgtgggtattgtgcttcgcaagaagatgagtcacctgggcgaactgtttattttcaagtctaagaagaaaaaatgattgttggagatatggagagaaaacataacataaacctgtttctattatcggtattgttgctgatgacagctgcctgctctactaccaggaatttgccggaagacgaaacgctatatgtcggtgtgaaaaatatggagattctgaatgaagacaagacccctgccggtgtccagaccttggaagaggtggaggctgctttgtcttatcctcccaataatgccattttgggaagcaactccttgcgttttcccattcctttcggtttgtggatatacaatgattttgtgaaataccaggataaaaagggggtggggcattggatcttcaacaagctggggtctactccggtgtatttgtctacggtgaatccggaaacccgtgtgaaggtggccaccaatctgttgcatgattatggctttttcaatggtgctgtgacttattctgtagactcgttgaagaatcctcggaaagccaagttaagttataagattgatatggcgaacccttattatctggactctgtcatgtatctgaaatatcctcctcgcgccgatagtctgatcagggctgcttatgaccagagggtattgcataaaggagataatttcagtgtgttgaaactggaggaggagcgccagcggctgagtacccttttccgtaacaatggttattattatttccgtcccgaattcattactttccgtgcggataccttgcgcaaaccgggaatggtcagtttgcaggttgttccgaaagctggagtgcctgccgatgcgaaaagaccttattatatagggaatacttctgtttatcttaccggatataaaggagaggaacctactgattccatcgtctttccgggaatgactttacactatagcggtaagaaacccggtatccgccccggagtattggctaagcgcttcttttaccagaaagggcagctttattctcagacccgtcagaatttcacgcaggaagccttggcgcgtttgggcattttcaaatttgccgagttccgctatgccccgcaagatacattgccggggtgtgatacgctgaatgtgcggatgaatgctacattcgatttgccgtatgacggagaactggaattcaatgtgactaccaaaagtacggatcagactggtcccggagcgattttcagcctctcgcggaagaatttcatgcgtacagctgccacgctttctttccagttgaaagggtcatacgaatggcagaccaattctacggcggacgggaacagttctaaattgaactcatacgagttggggacttctttttcattggagtatcctcgcctggtgttgccgtggatgagtaaaaaaatgatgagctcgcgatttccgcagcatacctcattcaagttgtatgccagtcagttgaatcgtgcccgcttctttaaaatgctttctttcggtggaacggtgtcatacgatttccagccttcgcgggtatggaaacatactgtgactcctttcagattggcatttaatacgttgcagcatactactacacgttttgatacgatagtggacaagaaccggagcttgaaaatcagtttgggaaatcagtttattccagctatgagttatacgtttacgtatgataacgccccgttgaagaaacgcaataatttatggtgggaaacttcctttacttcggcaggtaatctgacttcgttggtgtatgctgcttttgggaagggattcaaggaaacagataagaagttattaaacagtccttatgcgcaattcctgaaaatgacatctgaagtgcgttgtttgtttaaagtcggagagaaacagcatatagccactcgtttgatggggggaattttgtatgcatatgggaaccagactgtagcgccttacagcgagcagttctatattgggggagctaacagtatccgtgcgtttacagtgcgctctatcggtcccggttcttatcgtcccgaagataaacagtatggttatctggatgaaaccggagatgtgaagctggaagcgaatgtggaataccgtttccctatcctgggtgatttgtacggggcagcttttctggacgcgggaaatgtgtggctgctgcgtgaacaaaagaatgaggaaggtgagaatatacgtcccggcggtttgcttactcttcgtaattttgctaaaagtatagctttgggtactggggtgggattgcgttatgaccttactttcctggtgatccgcctggatctgggtattgctcttcatgatccgtatgataccggcaagaaaggatattataatattcctaagtttaaggatggactgggattgcactttgccatcggctatcctttctagaaatagggcttgatttgcgtcaaaaggagggaaatgattgatttatgctcgaatttgaatggaatgtagcttttttcctccgtattattttgtagctttgtaccatcaaatattcaattttaaataaataaactatgaaaccaactttatttttattggcggctggtatgggcagccgttacggaggattgaagcaattggatggtctgggtcctaacggcgaaactattatggattattctatttatgacgctatcaacgccggctttggaaaactggtctttgttatccgtaaagattttgaacaagattttcgtgaaaagattatttctaaatatgaaggtcatattccttgcgaattggtattccaggctttagacaatctgccggagggttttacttgtcctgcggagcgtacaaaaccttggggaactaaccatgctgtcatgatgggagctgatgtgatacaggaaccgtttgcggtgatcaattgcgatgacttctatggccgtgactcgttccaggtaatgggcaagttcctttctgcattgcccgaaggtgctaaaaacacgtatgctatggtgggcttccgtgtaggaaatacattgagcgagagtggaacggtatcccgcggcatctgtggaaccaatgcggatcatttgttgacttccgtggtagaacgtaccaaaattcagcgcatagacggagaagtgaagtatattgacgacaatggcgaatggacagctacccctgacacaactccggtgagcatgaacttctggggctttactcctgattactttgcttacagcaaggaattctttaaagcattcttgagcgatcctaaaaatatggaaaacttgaagagcgaattctttattccgctgatggtggacaagctgattaatgacggtactgctaccgttgaggtattggatactaccagcaaatggtttggagtaacttatcctgaagaccgtcagagtgtggttgacaagatacaggcattggtggatgccggtgaatatcctgcaaaattattttaagatgagaggtagtgtagtcacacttatataatttactttcgggggctgtccgtttttttttggacaacccccgttggattactattttttattttctgttttcattattgcatcttgtattcgctgggagataacccggtatggtgcttgaagtatttgccaaaaaaggaagggttcgggaagttcataaaataagctacttcctgaatagacatgacggagtatttcaacagcgctttggcttccagtattacatattcgtcaatccactctccggcagtttttccgctcactttctttactacggtggagaaatgtttgggactcaggaataattgctccgcataaaaatctacgcgtctttctttacggtgatgttcggtcagcaagttgatgaactggttgaacaatacctcttcccttttcagtgatttcggattctcggaaaggaattccggttgttttctatgaaggatggaacctatcttatataaataggcccccattagtctgcgtacgatttctgtcctgaagttatcgttccggcttacggtttcttctatcagttcatagaatgatttcagttcctgtacctcttcttccatcaaatgaaatttgggattctctttcaatgagatgaaaaatggcatgaaactgttcaggttgatatacatctcttttaagaaatcagatgatattaaaaacatttgtgacaaatgaatgcccggtgataacatggactgtagaatatcgccgggagcgcaaataatcagatcgttttgctcaatgtcgtattcccgtaaattgatattgactttggcagagcctttttcacggatagagataatgattccatccagccgtaatgggtatttaaagatggggttcatattctcggggatgtaatgttcgcttctatccattacgaaatcattgttaatcccttttagactgggattcatctgtcggatacgggctatggatatatttcctatttcatgttccatatttcttaattttgcctcaaatgtataaatcaaaagtcaataatccactctttttttctcataatattattttttaattgaaattgacggatgtgaattcggaggcgtgtgatggcaggaattcttaattctatttaaaagggggatgctggcaaactatttgtacataataacgtgtatatttaacaacagaattataaagaacaaaactatgtcaatgtattggatcttatttattggaatcgcggtaatcagctatattgtacagaatagtctgcaaagcaagtttaagaaatactcgaagatgcctttggccagcggtatgacaggaaaggatgtggctgaaaaaatgttgcatgataacggtatctatgacgtgcgtgtaaccagcactccgggtatgctgaccgatcattataatccggcaaacaaaacggtgaaccttagtgaaggggtatatggaagcaacagtgtggctgctgcggcagttgccgctcatgaatgcggacacgccgtgcaacatgcgcgtgcatacgctccgctaaagatgcgctcggctttggtgcctgtggtgcagttctcatcttctattatgacttgggtgttactggcaggtattttgatggtgaatactttcccgcagttattgttggcaggaatttgtctttttgccatgaccactcttttcagctttattacgttgcctgttgagatcaatgccagccagcgtgcgttggtatggttgagcaaggccggaattacaaattcatataaccatcatgcggcagaggatgcgctgcgttcagctgcttatacgtatgtggttgcggcacttagttcgttggctacactgatttactatataatgatttatatgggacgtcgtgactaagaccttataagggaaatatatttttattatagaaggctgcctgcgggcagccttttctagttatattttgattagtttcgagataatttttgttttaatctctttttcttttcgttttaatttgtatttttgccctgtcagcaaaatgagataatacctatgaaaaaacatttgggagccatcaaatacttggtcatttagaataatttgatgatgagaaacacaataaagttaaaatatatatggtgtactttgtttttacttcttcattggggttttgtcaaagcacagcctatttgtgttgcacgccaatatacagtgagagacggattgattcaaagtaatccggcgcagattcttcaaagtcataatggttttatatgggttagtacttggaatggggtaagccggtttgatggacgcgatttcgaaacttttcagtttgattctcttttgaaccagcacatgcagcggctggagaatacggccgacggcaatttatggatgattgcatacgatcgtcatagcctgtatttatatgatattcgtgaaaataagctgatcaatgttctgaaacagtatgaacaacattttaatactccgttgcaaatagaaaatttgtatcctttatccaaagggattacttgggttactttaaataatggaggatgtttcagaatttcagataaagagtgtactgtttcttcagggattcagtatattacagctattgatgatgtggaactggggaaagtcagtagggtctttgaagataaacagggagaggaatgggtatttagtgacaagggagttagcatatttggcaagcggaccattagttcatatcccttttctatgttcgaaacaatggataatcttgtttttcttgcatcacagaatggcaggctagcctattatgatgtaaataccatgcaattcaacatcgttccttttcaagagaagattcagcatataaacggaattaaagtgttgaaagataatcagctggctgttttgtctgataaaggtttgtacctatgccgtttccctgaactggcgatggagaaatatgatttctctcttccggggcgtgacgatgcggctgtgagaaaagtctatcaggattctaaaggatttctatggatatttaccggattgccgggaattatccggcttgatccggaaaccggagtgaaacaatatttgaatactccttccggatacatggcttcttctccggaaaatgaactctttatttatgaagatcctaacggagtggtttggactattccttataaaggtatattcagttattatgacgaaaagagccgggagctaaaagtctattttacaccgggaaggaatcatataccttattctcctattattaaaacaacttatgttgacaaacaaaataatttgtggatcaaatcccagcgctcatttataaaaatgttctttccgcccagtccctatacttatagggagttggacaattattttgatacaaaatcatttctgtttgatagcgacgaacatttatggattgcaacaaagaaagggattatacgtattatggattcacagaaaaacttgttgggttatttgtcgcctgatggggaactggctcaaacggaaacagtttttgcagaaggtggaatctatgtcatgctgaaggatcaggcgcagacaatatggcttggcagtaaggaaaacggattgttcagacttgttcctcggaatcgtccttatcattatgaagtatatcattatatgaataatccgtcggatccttattccatcagtgacaataaaatatcatgcattgatgaggatcataacggacgtatttggattggtacttacggtggcggattgaatttggttgaggaaaaggaagatggagcgatacgttttattcatgcggagaataaattgtccggttttcctattaatcgtaccaacagtattcgttgtatggtggagggacccggtcatactatgctggtgggtactatagaaggtttgatcactttttcttctgatttttcggattacgaaaatattcgtttttatcttaaccttcctcgtccgcaggtggctgacggattgtgtagtgctgatgtgatgtctgttttacgagcgacggatgaaactatctattgttattgttatggaggtggcctttgtaagttggtttcgtcaaatttattatctgatgaacttcggttccggtcgttcggcaaagagacatctccgttggctagagccttgattgaagataaaaatcataatatatggatcggctcggaaacggatatcactctgtttgatgtgcacgatcagacttttgagtcttttggagaaacttttttcaatcgctcttttaattatagtgaatgtcttccggttacagacaggcaaggggatatcttaatgggtacagaaggcggtatgcttgtcttttctccggatagtatcgttaagcagacttatgaagctcctattgtagtgacaggtataaaatattcggaggataatttgtctcatgtattgagtgatgcggattatttagagatccctacccggcggaggaattttaccatctcatttgctgcgttggattatactaattccttggatatcgagtatgcttataagttggatgataatcaatggtattatataggtaagaagaactcggttagttttgtaagtcttccggcaggaaaatatcaatttcagataaaggcgaccaatggggatggtatttggatgaacactgtgaaaacggttactttacaggtattacccaccttttgggaaaccggttgggctaaggctttttatctagttgttgtcttggtgatatctttagctatcggatatgtttttttctatatttactatttgaagcataaggtaaatatggaacaaagattggcggaaataaaagtacgttcttttattgatatctcacatgaactacgtactcctttaacccttatatccggtccggtatccgaagtgttgtcccaggagcctttgacttcccggacccggcatcatcttcaattggttcagaaaaatatcaatcgtatgttattgctcattaatcaagtattggatttcagaaagatacagaataaaaaaatgggcttgactattgaataccgggatatcattatcatgcttcataatataatggataatttccggttgttggcaacagaaaaaaatataaatttttctcttcagacaacgttgccttctgtttttttgtggatagatagtgataagttcgagaaaattatctttaacttgctttccaatgcctttaagtatacaccggataacaagtcgattaccttgattgtgatggaaagcggacagtttgtttcgattgccgtaaaagatgaaggtattggcatctctaaagataaagtgtcatccatatttgaacgtttcactacagtgtccaaggaaaatgacatgcagccttcatcgggtatagggctttcgctggtgaatgagttggttaaaatgctgcatggggaaattcaggtcgaaagtgaagtaaagaaaggaagtgtattcaaactggttttgcataaaggaaaagaaatatatgctcaggataaaaatgttgaatatatattgaacgacacttcggaagaacaggaaacggtcttggcggaaccggaacaaaatgataaaatatctttgccggacatgcctccggcaacaaaagaaactttagtaaaagtgatggtagtggaggataatgcggagttgcgtcaatttatatgtgaaatattgtcgggcacttaccgtgttgttggagttgccgacggggtgatggcattggaaaagatagaagaggaaattccggattttattattacggatattatgatgccgcgtatggatggtattgaattgataaggcacatcaaggagaatgtcaatacctgtgatatccctcttattatcctttctgcaaaatcgtctgttgaggatcgtattcaatgtttacaattagggattgatgattatatacctaaacctttcagcagcgattatttaaaatcgagaattgagaacttgatcaggcaaagaaaagtgcttcagtcggcttttttgtcaaagtatggtgctcaaccgaagaaagaacctttagaagccgtcgcttatcctgtgtcgcaaattgttcctttggacgagttgtttatgcagaagctggtaggatttatggaagagaattacagtaatccggggctgcgggtgaatgatctggcagagttcatgaatatgagccgctctgtattcaatcggaaagtgaatggtatcatggggatttctccgatagaatatataaagaattataggttgaataaagcgaaaagttttatacaaagtggtatgtctttctctgaggtcgcttttgccgtcggcttctctgatcccggttactttggcaaggcgtttaaaaaagcatttaatcagactttgactgagtataaaaataataactaagttccgttttgtgctgtttatgaaggtaaatagcaagaaaataccttattgacgtaagattttacctttggctctcaagggtaaaatctatctttgtgctcattgacacagtatgaaaatgttccggaaaacttttatgagtataatttttaaaacatgataggatgagtacaaaattttatgtaatagctgtttggacgctgttaagttttgtggtaaaagtaaatgcacaagacaaagtggaatgttgggaccggtttgagttgagttttaaacaggtgaccaaagggaatccttttgatacacgtctttccgctactttcgtttgtggaaaggaaaagaaaacggtggaagggttttatgatggtgagaatacttataggatacggtttatgcctgctgtcgccggggaatggaggtatgttacatcttccagtataggggctatgaatggtcggaaaggtacattcacagtgatacctgccggaaaagataatcatggcatggtattggtggacggagaacataattttaaatatgcggacggtacccgttattatccgatgggtacgacggcctatgcatggacacatatgaaggaaacgactcaggaggctactttgaaatcgtttggtgaagccggttttaataaggtaaggatgtgtgtgtttcctaaaaactattctttagtgaaagacgagcctgcgctttatccttttgaaataaggaagacgataaaagataaggaaggaaatgaaaggaaagaatgggactttgacagatttgacccggctttttttcagcatttggagaaacggatagaccaactgaaccgtttggggattgaggcggatttgatccttttccatccttatgataagggaagatggggctttgatgctatgtcgaatgaggtgaatgtacgttatattaaatatattactgctcgtttggcttcttttagaaatgtatggtggtctatggcaaacgagtgggattatgtaaaagcgaaaactgtggatgattggaagctgttgacgaaaactgtggttgagaatgatccttatcgccatttatgttctattcatggagcgacggctacttattttgattattggatgcctgaatttacccatgtcagcatacaggatgaggcaccggtactgagttctaccgcttctgctactttaagaaaaatttatcgcaaaccggttatatgtgatgaggttgggtatgaagggaatctaccttatcgttggggaaggttaagtccgcagcagatgacttgctttattttgaatggtttgttgggtggaatttatgtcactcacggtgaatgttatcagcaggggaacgaacctatcttttgggcgcaagggggatctttaaaaggtgaaagctggaaacgtgtgaaatttttaagaacgattattgaagctgctccccatccgttggagatggcagatatcagtcgtgacttggttacttctactgctggaccagattattatctggtcaatatgggaaaagatgtgaaaggtttctggacttttaatctgccggtaaaaaatgcggattataacaaattgcaaaagaataaacggtttaaagtggagattattgatgtgtgggccatgactgtcacggaatatcctgtgatatttgaaacaacggaggaattggattatcgtgtttttgatatacatcatcggggagtaagaattccggatgctccttatattgttcttagaataacagaagtgaaatgatgggataagccttctgacgggagatgattgattttttttatcataaaaaaggctaatagttttcgattctttttgttttagcttaaatttgcggtataattaactccctagatacactaaaatgttaaatacagtagaagaaggattggaagatattcgccaaggcaaagtattgatcgttgttgatgacgaagatcgtgaaaacgaaggcgattttatcgtttcaggagaaaagattactcctgaaattgtaaattttatgattactcatggcagagggttgttatgtgcccctctgccacattcacgttgtgaagaactttgtctggttccgatggcagaagaaaacacttcattgctaggtacaccgtttactatgtcggtagatttaagagggtatggctgtactacgggagtttctgctttcgaccgttcgtcaacaataaaagctttggtggcaggaaatctgaatccttccgagtttgctcgtcccgggcacgttttccctctatatggtgcggaaaatggggtcttggagcgtaatggacataccgaagccacactggatatgacaagaatggcaggtttgaaacccggaggagctcttgttgaaattttgaatgaagatggtacaatggcgcgtcttccccaactaggtgagattgcagcaaaattcggtttgaaaattgtttccattaaggatattcaggaatatcgtaaaaaacataacctctaaatctaataaatatggcactcaatcaaagaagagtaaagatattgcatctgattcgtgaagacgggcatgcaaaagttcaggaccttagtaaaattttcaatgtgacggatgtaacgatccgtcaggatttggaagccttggaacaaatggggtatatccaaagagagcatggaggtgcgtttctgaaaggagtagggtcgtttgccaagaccgggcaattgttcaatcagactcatttggaggaaaagaaagaaatcgctcagaaagctattcagtttattcaggagggggacagtataattcttgattccggttctacaactacagagatcgcaaagcttttaatgaattataaggacctgacagtcattaccaatgctttgaatatagctttgattttaggtgagaatcatggtattaatctgattgttaccggaggtgaattcaaggctcctacactttctttgacaggaaaaatggcggccgattcatttaaagatatacgcgctaataaattgtttctggctacggccggtatttcttcggatatgaagctgacttatcctagtctaagtgatttggtcgtgaaatctgctatgatagagtctgccagtaaagtgtatctggtggctgattgttcaaaaataggtgtcagtgcttttgctagtttaggctcggtttcattagcaaatgctattattacagatagtactataaccgaagaggattttgaaagattaaaagaattagaggtcgaagttatctgattcttactgaaacaaaggtaatatgggtgattgagaatgttggaaaatacattcttgatcaccttttttatcaactttgattttacttccttatttctccttattgtttgcttctttttttataacagttctgttgggtacaaaatagacaatcggagagtcttgtttatatagagatataactttgttagcagaataaattaattgtcctgatttatagattatttaggcgtttattgttaatataatcaaatttattttcattttatttcgttttgtattgaatgtttccagttaaattccgttatttgcgaaagtataagaaagtaaatgataataatatgcaagttgaaacgttagaattacaatcggaaaagaatcggaaacggttggttgagattgtgtataaagcaaaagcaggacacattggaggtgatctgtcgtgtcttaacgtgcttacagcactttattttgatataatgcgtgtttggccggataaaccaaaggaaacgaaaagagatcgttttgtaatgagcaaagggcattgcgtagaagcgttatatgttacgctggaagcaaaaggtttcatctctcgtgaggtaaccgacacattaggagaattcggatctatcttgtccggccatcctactatagaggtaccgggtattgaagtaaatacaggagctttagggcatggcttgtctgtaggtgtcggaatggcgatggctgccaaaatggataaagctgattataaaacgtatgtattgatgggagatggtgagcaaggggaaggttctatatatgaagctgctatggcaggaaaccagtataaattggataatctggtagccattattgaccgtaatcgtttgcagatcagcggtacaaccgaggaggtcatgtcattggagagtatgcgcgaccgctggactgccttcggttgggatgtattggaaatgaacggagatgagatggaagatatcatccggactttccgttctattgattatacgaataaaaagcctcatttgcttatctcccatactacaaaaggaaaaggagtgtcttatatggaaggcattgcaaaatggcatcatggcgtgcctacagccgaacaatatgaagaggctgttcgcgaggtatccgaaagaattgaaaaactagaaaaagaaaacaatggcaaataatatgatagcgtgcagaaagagctttacagatacgttgctggagttggcgcgtcaggataaagatattgtggcggttacaacagacgccagaggatctgttactttgggggattttgcaaaagaattacctgcacagtttgtagaatgtggaatagccgaacaggatgcggtaggaatatcagcaggtttggcacatagcggaaaaaaagtgtttgtatgtggcccggcttgcttttacgtggcacgtagcttggagcaggtaaaagtggacttggcttacagtcagaataatgtgaagatactcggagtaagtggtggagttgcttatggtgctttgggggctactcatcatagcctgcatgatattgccgtattaagaacttttccgggaatgaatatcgttcttccttgtgatgcccgtcagacacgcaagttggtcaaactattggtagattatcctgaaccggtgtatgtacgtgtaggaagagctgctgttcccgatgtgtatgagaatgatgattttgattttgttctgggaaaagctaatatgctgctgaacggtacggacctgaccatcattgctgccggagaaacggtttatcatgcttatcaagctggtttgatgttacaggagaaaggcattaaggcacgtgtgttggatatgtcttccatcaagcccgttgatgcggaagccatcaggaaagcggcagaagaaaccggaagaattatcactgtggaagagcatagtcagtttggtggtttgggagctattgtggttgagacgctttccgaaaatccgattccggtacgcattatcggcatccccgatgagaacgtggttcatggaaactcccatgaaatctttgcccattacggattggataaagagggcatctgcaagactgcccttgaattcgtgaaaaaataaacatatcctttttaaatctaatagtatgattagcagaataattaccatagatcaaagtacttcggcaacaaaagccatgctgttctctgaagattgcgaattgttgcatcgggtaaatatagaacatcagcaattctacccgcagataggatgggtagagcatgatgccgaagaaatctataaaaataccatagaagcgatacattgtctgcttgaacaagaagaagtgaatggaaaggatatttcttattctcttgccatcaccaatcagcgcgaaacggtggttgtttggaaccgacataccggcaagtccgtttatcatgccgtggtatggcaatgccagcggggagcggctatttgcaaagaactgaaagataagggatacagcgaactggtacaacgaaagaccggattgcttatcgatccttatttttctgccagtggtgctaagtggatattggataacgtggaaaatggacgtgaactggcagaaaaaggcgatttgttgatgggaactattgattcctggctgatttggaaactgaccgaaggcaggaagcatctgactgattatacgaatgcgtcgcgtaccatgctttttaatattcatactttggactgggatgaagagttgttgaaactcttcactattccccggagtatgatgccggaagcgttgccctgtgatgctgtttttggagaaacaacgatagagggtttgttcaaatctccgatacaaatagcaggtgttttaggtgattcccatggagcattaaccggtcagatgtgttttgaggcaggtatgggcaaggtgacttatggaacgggatcatctgttatggttaacattggagaagaggctgtcgctgctcctgaagggctggttacatccgtcggattctcggctttgggtaaagtgtattatgcttttgagggcaatatccattgcaccggagccactatcaaatggatggtggagaaattgggattggtggactcgttcaatcaaattgaaaccttggcgacttcggttaaaaacaatgatggagtctatctggttcccgcctttaccggattgggagctccctggtggaaaccggatgctaaagctgccatctggggaatgacactgaatgctggaaaagcgcatgtgctgcgtgcaggattggaatccattgcttatcaagtgaaggatttgatagacatgatgacccggcaggcaggaatcgagctgaaagcgttgcgtgttgacggaggccccacgaagaatcagttcctgatgcagtttcaggctgatatgctgcatgccgtcattaaccgttcggagatagaggaagcttctgcattgggggctgttgtcatgaatggctttgcccgtaagaagtgggccagtttccaagaagccgctgccatgcgtaccattgacaattgcatcgctccctgtatggaggaaaaagaacttcaatctttgtatagtggctggcgtgaggctgttaagaaagtaataggacagaataactaactgaatatatcgtaacttttaataccattagaaatgaaaaacaagaaaaaaatgtgttttggtgtcatcattggaacacgcgcttattttaactcggaattagcaaaagatgtccgtaaacaattgttggaaacactgacgaaagagggctatgactatgtcattctccccgaagatgctacgcctacaggcagtagcagtattgaaacaagagaagatggcttgaaatgtgcaaagttgttccgtgagaaccgtgaccgtattgatggaatcattgtttcattacctaacttcggttttgaaatcggtatcatcaatgctatcagtgtagccgatctgaatgtgcctgttttggttcaggcatgtgatgatgagaatgacaaggtggatttggatagccgtcgtgacgcgttctgtggtaagatttccgtatgcaataacttgtatcagtatggcattccttttactgatactacgctacatacttattctatttattctgatttgctggcagccgatattaataagttcgctgcgatctgccgggtggtgaatggtcttcgtcatgctcgcatcggtgccatcggcactcgtcctgccggtttccagaccgtccgcgccagcgagaaactgttgcaggcatcgggcattacagtcgttccggtagatctttctgaaatcttgtctgccgcccgtaagattgaagatgctgatgaaacgttacaagcaaaactgaaagaaatcagacaatatgctgctgttcccgaacaatacaatgataaactgattttgcaggctaaatttggtgtggctgtagaacaatggatggaagccaatgaaattgatgctgtagctatccagtgttgggactctttggagcaaaactatggttgtgcagcttgtgtgactatgagtatgttgagtgaaaaattaatccctgctgcttgtgaagtggatattgccggtgcagtgtctatgtatgcgttgacattggcttccggtcgcccgtcggcattgcttgactggaacaataactttgccgaggatcgtgacaagtgtgtgtgtacacattgtggtaacttccctaaatcatttgtaatgaatgatttgaagttaggaacattaggagtgttgggcagaacattaggtaaggtacatactttcggtgccgtttacggtaaagtaaaacagggtgatttcaccttcttccgcatctcgacagatgatacgaagggttgtatcaagtcttatttgggcaaaggtgacctgaccgatgacccatacggaatggatggttgtatagcagtaaccaaggtggataatctgcagccgcttatgaaatatatttgtaagaatggattcgaacatcatgtggctatgtgccgtggcaatgtgaaagatattttggcggaagctattgaaacttatctgaactggaatatctatattcacgaataatatcgatgaaatatgatattggtagataattactttttggcaatcctctgctgtgttatttgctgtgcctgctggggctcttgggcaaatacgcagaagatggttgccgccaagcaatggagctttgaactgttttattgggatttgaccgtcggtctgttccttacagctttattgggggcggtgactttgggaagtatgggaagtgaaggccgtaccttttttcaggatttggcagtcatggactggtctagcattcaatatgcattcttgggcggtgttgtgtggaactttggcaatatatttcttaccgcagccattgctgtagccggaatgtcagtaggttttcctatcggtggaggcttggcctggattggaggtattgtattcaattatttattaatctctttggccggtcagacctatcagggaaatcagcttttactatggagtggtgtgttagtcatcattgtagctatactgatctgcggaaaagcgtacggaaagttatcgtccggcaaggcttccactccgaagaaggggattctgctggccattatggcaggtatcgctatcatgttcttttacggattggtagtgaaatctcttgacccgcagtatgtggcgggaggaaccggaacgctgactccttatacaggtgtgttcttctttgcggtaggtattctggccagcacacctatattcaatacctttgccatgaagcatccggtagaaggcaaggcggtgaccatgaaagattactttgccggcgatgccaagacccatctcacaggtatgctgggaggctttatctggatgggcggcatggtgattagttttatgggagcaggtgctgccaatccggctatctcttatgcccttagcaacgcagcgcctgtggtggctatgatctggggagtttttgtctggaaggaatttaaggaagctccgaaggggaccaataaactgattgcggctatgttctccttgtttattatcggattaataagcattactttgtcaaattaaaaattagatgaagagaaattataaaatagggcttgtaatgaagtcgttacaagccgattttttcaaagtgatgaaagaaggggccattcagtatgcggcccctcttccgtttttggatttggtttgtgtgggaacggctacacagacagaggtagaggaacaggttgacttgatgtattccttgattcatcagcaagtcgatgctatcgtattggttcctatagattcaaaagccttagttcagcctgtagtagaggctgtcaggaaaggagttccggtaatcaatattgatatccggttggatactcagctattggagcaggcaggagtagaagtggcttttgtgggaccggataattttgcagctgcgtatgaagtgggtaaattattggataagaagttgcggaatgaagataaagttgctattattgaaggattggcggcagccgataatgcacagcagcgtaaaagaggttttatcaaggcgatagaagaaaaagggttaagattggtggcatccgaaccggccgactgggaaacggagaaagccgccgaagtttttcaggctatgtggatgcggtatcctgatttgaaagctgtatattgcagcaatgatgcgatggcgttgggggttcttcagcagatgcaagaaaaaaattgctatctgcctgtagtgggctttgataatgatgcggtaatgaaagaatttctttctacgggaaaactggttgcaacagctgatattttcagctcacagatggctgtccggggcattgagttcgctttggatgtattggagggaaaaatagagaatagaggggttcattctacagcttacgaaattattaaacaatgagttcgtagggaaacggcccatactgagatatgcacttaaggcaccggctgtttaacttcttaatattgccggcaatgagcaatattaagaagtattctttttacgaatgaaatatttagtgtaattttgtggctcaaaataaattaaatagaatcattatggcagcaaaaccaggtatacctaaaggaacgagagatttttcgccggtggaaatggcgaaacgtaactatatattcaatacgatccgtgatgtgtttcatcttttcggctatcagcagattgaaactccttctatggagaatttgtctaccttgatgggaaaatacggtgacgaaggggataagttattgtttaagatacagaactcaggtgattatttcaacggcattaccgatgaggaattgctgagccgcaatgcggtaaagctggcgagcaagttctgtgaaaaaggattgcgctacgatctcaccgtaccttttgcccgctatgtggtgatgcatcgtgatgaaataagttttcctttcaaacgttatcaaatccaaccggtttggcgtgcggatcgtccccaaaaagggcgttaccgtgagttttaccaatgtgacgccgatgtggtaggcagcaattctttattgaatgaagtggagctggtacagatgatagaccgtgtatttggtaaattcggagtacgtgtttcaattaaaatcaataaccgtaagatattgaccggtattgccgagattatcggggaggctgataaaattgtagatattaccgtagccattgacaaactggataaaatcggattggaaaatgtaaatgcggaattggcttctaaagggattcctcaagaggctattgataaattgcagccgattattttattgagtggaagcaatgaagagaaattggaaactttgaagactgtccttgctaccagtgaagcgggattgaagggagtggaagaaagtgaattcatattaaaaaccgtgtctgcactgggtgtgaagagtgaagtggaattggatttgactttggctcgcggcttgaattattatacaggagcaatttttgaagtgaaggccttggatgtgcagattggcagcatcagtggtggtggccgttatgataatctgaccggtgtctttggtatggatggtatgtctggtgtaggtatctctttcggagccgaccgtatttttgatgtgttgaatcagttggatttgtatccgaaagaagcggtgaacggaaccgagctgttgtttgtaaacttcggcgataaagaggctgcttattgtctgcctatcctggcaaaagtccgtgaagcaggggtgcgcgctgaaatttatccggatgcttctaaaatgaagaagcagatgggatatgccaatgacaagcagattccttttgtcgctattgttggtgaaaatgaaatgaacgaagggaaactgactttgaagaatatgactacaggcgagcagtcactggttacaccggatgagctgctggcggtggtgaaagcttgatgtttactaattatctgcaatcataccataaaagcttcattgatggatgattgcatcacatgggaatgcccgataacgtttgctttatacgttatttgtattgaaatataaatgctggattacctatgtggataatcagattgttttttcttccgtcactacatcttactgattctaaaagagatgtagtgacggaaatttttgtatcccgccgaaatggtttgttctcttttttccgcgtagaggcgacaaagcggaatgcctgttcttgtcgttgttggttgtatttcttgttttaaggatgaaaactgatggagctgacttgaaatatgattttcttttgcgagagtctgatattattcactatatttgtggaatgctagccttataaatttaatcagatgatagaggaaaatcagttgatatcccatttgtatcaaaatagggataatggtcaatggatgatacaaaccaatgatgaacatcaaaagggggttgctgatatggcggcatccttcgccgggcagttcggacttccttcttgggggcgtgcgctcggcctacttcatgacaaaggaaaggaacgggcggcattccagcaatacatacgcaagatgaatggtttgcctacgagtgacaagaagcgctatgatgatcatacccatgcttttgtgggtggaatattggcaaaagaacttatgggaaaggatgtttcccatcttcttgtaaaccaaattatttctcatcacacagggttacatgatttcggggatgtggaaaacatattgaaagagaggctattgtccaaagaaataaacgagggtgacattagcataaacaaacctttattattccaagaatttattgattcacctttttctaaatcaaaggttgaatggaaacactttcatcacctttcccgtatgcttttttcctgtcttgtagatgccgaccggctcgatacagaacggtttatggatgtagagtcatggcggaagcggggaaattcggctacgcttgccgatttgcttccacagctggaggcatatatgcaaaaactgcaatcgaatgcagccgatacgaaagtgaaccgcatccgccagcaagtgaaagaacaatgcagtagaacttcttcaagcgaaaaaggattttatagtcttacagttccgacgggaggcggtaaaacactttcttctttgttatgggccatgaagcatgctgtaagccattcaatgaatcgtatcatcatcgccatcccatataccagtatcattgtgcaaacggcagggcttttgaaggaaatctttggtgaagaaaatgtattggagcatcatagtaatttcgaccccgatgatattaaggacgaggaaaatagggaaaaagcaaaattggctacagagaattgggactatcccattattgtcactaccaatgtacagctttttgaatctatgtttagcaataaaacatctgattgccgcaaactgcacaacatggcaaattcaattcttgttttggatgaggttcagatgttgccaaccggcttcttgcggccgatagtcgatgcgctgaaagcgtatcaggaaatgttcggggtttcggtattgtttaccacggcaagccagccggtactgagtggtctgatagaaggaacaaatcctaaagctgattttaagggaatagaacatatcaaggaaattattccggaagaatttgctttgcatgaccagcttcgccgtgtgaagttgtcaatcgatgatacaggaaaaacatacgatgagatagctgcaaaggtgtctgaatataataaggtgttgtgcatagtgaacactcgtaaagatgccaaagagctgtatgaccgtttgcccaatgacggagtgaaattgcatttgtctagaatgatgtgccctgcccacttacacgaaactattggtaaaataaaaactttattgaaggatgagtcgcagccgattgtcagggtcattgcaacccagcttgtggaggccggtgtggatatagactttccggttgtgttccgtcaagaagcaggactcgattctgtattgcaagcagcgggacggtgcaatcgggaaggacgaagtgccatgggacatacatttgtgttcagtctggcggcagagaagcgaaagctcttcggttcaatggctgactccaacaatgctcggttgaatttgccggaagatagtgattggtttgctccttctaccatgaaagcctatttttgtcaattgtatagcagaaaacaaacatttgatgaaaaggatataaagcactggctctacaaacctactgagttatgttttgaaactgcatcaaaagaatttcacctgattgatgatacgagtataaatgttatcataaattgggaaaacagcatggaacttatagagcagttgaaagaatcggggtgtacctactcgttggtgaagcaattggcgaaatttactgtaggcatccgttcctatgattttaagcaactgaaaggctatgggcttgtcgaagaaatattggaaggaatatatgtattggcagacaggtctcagtataataaagccacaggtctcagccttgataaccattggctggaggaagtattaatgatataaagaaacggatatgacaaagaaagaaacattgaaattgtttgaagaacgtaaagtccgcaccgtgtgggatgatgaaaaggaaaaatggtatttttcgatagttgatgtggtgtcagttttaacagacagtgttgatgcaactgcttattggcgtaagttaaagcaaagacttaaagaagagggaaatgaaaccgtgacaaattgtcacggtttgaaaatgaaagccacagacggtaagatgcgacttacagatgtggctgatacagaacaactactacgtatcattcagtctatcccatctcccaaggcagaaccgttcaagcaatggatggcacatgtagcatccgaacgtcttgatcagatgcaagaccctgagttgagtattgagcaagctatgatggactacaagcgacttggttactctgacaactggataaaccaacgcttgaagagcattgaaatccgtaaagatcttacagatcaatggaaactacataatgtagaggaaggtgttcaatatgctactcttacagacattatctatcagcaatggaccggaaagtcggcaaaggagtacaaacagttcaagggcttgaagaaagaaaatctccgggacaatatgaccaatgaagaattggttcttaatatgctggccgaactctctacgacaagtattactaaagctaaaaatcctcagacattgggtgaaaatatgcagtgtgcggctgacggtggtgatgtggctcgtgtggcacgcgaacagttggagcaaaaaaccggtcgtgaagtggtaactcccttgtcggcaaaaaggttttttgaaggtcagaagccggaagatttattggaaaacaaggaaaacgatgaatgatatggaatatacagataaagaatattgtctggaggtgtggggcgattgggcttgtttcactcgtccggaattgaaagtagagcgtgtgagttacgatgtcataacgccatcggcggcacgcgccatctttgaagcgatactgtttaaacgctatgccatgcgttggcaggtaacaaagattgaggtactcagacctattaaatgggctaccattagacggaatgaggtgggggcagttgccagtaaatcacctatcattattgaagataaacgtcagcagaagaacacgttgcttctgttggatgtgcgttaccgaatttatgctaagttagtatttattccggtaaaagaccgtccgaaagaggcttttgccaagcatcagccaagtgccgacgagaatcctatgaagtattatcagatgttcgaacgcagggcatcacaagggcaatgttttacgcagccctatctcggatgtcgtgagttttctgcaaactggaagtatattgaaagtactgataatcttgattatcccttagccgaagacagggatttcggcattatgctttatgatatggactttgaggaaaatccacaaaaaccgaatgctatgttttatagagcccaaatgaaaaagggagtgattgttgtaccggataaagatagtgaggaggtgttgagatgatactgaaagcattatatgattactatcatcgaagtggagatgatgtggccccttttggtttagaatacaaagagattggatttattattgttattgatagatgtggaaaatttctgcgctttgaagacaggcgcatagataagaagtcggcacagcggtttcttgttaagaaaagtgttagccggtcaagtgcccctgttgcaaactatttgtatgacaattgtaaatatgtatttggttattccgataagggggatatggaaaagatacgtaagtactttgaagtatttaaggcgaaagtaaaagatatatatgatgcttttccggataatgaggacataaaagctgtttatgcattttatcagcaagaccattcttttatagttggggctatgcagaaagattctttatgggatgatatagccaaaaatcttaataagaaatattctaccttttctttccttatagaaggggatacgaaaatagtggcttcgaaaagggaattgataaatttgtttgacgagaatcatggcgtggcaggaaatctttgtttgataacagggagatattcaaaagttgtagagattacaactgctacaaagatacttggaagccaagaaacagctaaactagttgcatttcaagttaattccgggtatgattcgtatgggaaatctaaaggatacaatgctccaatatcagaagaagctgaatttgcatatacaaccgcattgaatcatttgctgcgttcggattctcacaataagtttatggtgggctcacgtacttatcttttctgggcttcctccaatagcgaggcttcaaaagagtccgaaaatagtctattttctttgttggggcggattgaagaagaaaatgacgactcaaacaggcgcataaagttagtatatgatactttccagtctatctataacggaaaattatcggcaaacgatgatgacaaattcttcattttgggtttggctcctaattcggcaagaattgcggtagtatattggaatgagatgcctttgcgtgaatttgcaggtttgataagtaaacattttacggatatggagatggttgacactcgcaaagataagaagccgtacgtgggaatgcattccattcttggaaatgttactcttggaggaaagtcaagtgatgcgactcccaaccttactgatgctgtggtgagaagcatatttcaagggttgccgtatccggcttctctctttcaagcatgtattcgtcgcatacgtgcagaacaatccgtcaatatagtgcgtgctgctatcatcaaggcatatctcaacagactaaacgaaaataacaaccataaaaaattagatattatgttagacaaagaaaatcaaaatcaagggtatctttgtggaaggctgtttgccgtgttggaaaacctacaatatgcagcaaataaacaagattccattcgttcaagttacatgaacgcggcttcatctacgccatctacagtattttcaacagttctcaaattatcaaacagtcattatgctaaattggctaaagagaagaaaggccttgctaatttctttgataatcaaaagaaagagataatagttttaattcaaaattttcctaatacattgagtttggaagatcaaggacgattcttcctcggctattatcatcagaaagctcacagagagaatcaagaaactgaagaataatttttaaaaatatacaattatgtcagaattaaagaatagaattgatttcgtttacatttttgatgtacaagatggtaatccaaatggtgacccggatgcaggtaatcttcctcggatagatgctgaaactggtataggccttgttacagatgtttgtttgaaacgcaaggtacgtaattatgtacaaatagcccaagcaggaaaagcaggtaacgatattcttgtcaaatccaaagaaatttctggagaagaggtctttattaatgaagaaatccgcaaaatgtacaaagaagatttaggaatagaactaaaaatcaaagaaaaagctcctgccgataagagttcagctggtaaaattgctatgtgcagacgcttctttgacgttaggacttttggagcagtactctcaaccggacctaacgcaggacaagtgagggggccgattcaaatgacttttgcccgttcgcaagatatgattgtttcagcagagcatgcattaaccgtatgtgtagctcgtgatgaagaaaagacctatgaatcacaagtgggaatacagggacgtaaagcgaccattccttatggcctctatgtctgtcacggcttcatctccgctaacttggcacaacagacaggattttctgaagaagaccttgaactattttgggaagctttaaagaacatgttcgatgtggatcgttcggcggcacgtggattgatgagtgctcaaaaactgatagtcttcaagcatgactccatattgggtaatgctcccgccaacaagttgtttgaattggtaaaagtggagaaagtctgcgatggagcaccacgctcattcatcgactattcagttactatagataaggagaatgctccatcaaatgtaactattgaggaactgatataattccatcgtatgtacaatgaagacgatatgctcatgttgtcggggattcagcactttaggttctgtccccggcaatgggctttgatacacattgagcagcaatgggatgataatcgtctcaccatcgaaggacagattctgcacaagcatgtagatgatccgttttatagacaaaagtgtggtgaccagataacattgcgtgcggtgaatatcgcttcgcgtgaacttggactctatggaatctctgatgccatagagttacttccttcctcatcttttgaaaatacgattttgcatcccaactatccggggcgatggcaaccggttgctgtggagtataagcatggcaaaccgaaaagaaacgaggtggatgaagtgcagttggcagcacaaatcatgtgcatagaagaaatgtatgctatccatataccatacggctctttcttttatggggagcttcgccatcgggttaatgtggatataacggaggagctgcgaaatatagtcagacaatgtgcccgggatatgcacgatatatttagtaaagcggttatcccgaaggctgaatatgggaaacattgtgacaagtgctcgctgaaagatatctgcatgccggaaatggtaaataattgtacttcggtagataattaccttactaaaaatctgtatctatgagaaaactattgaatactttgtatgtgacgacaccggaagcgtatcttagtaaggatgggctgaatgtcgttatatctgttcagcaggaggaggtgtttcgtattcctgtcataaatatagagggcatcgttacgttcggatatatgggcgcaagtcccggtgtgatgaaattgtgtagtgacaatggtatatcactcacatttctttctccacaaggcagatttatcagcagggttcaaggtgctacgaaagggaatgttctgttacgcaaaaagcagtaccaattgtcggacgatgcatcttggtcgttgcatgtggttaggttgatgattggtggtaagattcaaaactatcgcaatatattgaggagatatattcgtgattatggtgagaatgaagacattaatagggcggtgcaagtattggaacgtgccaagcgtgatgctttgaaggctcaagataagacggaattaattggttatgaggggatggcttcgaatgcctattttgaggtattgccaatcttgatacttaatcagaagactgatttcccatttcatggtcgcaatcgtcgtcctcccaaggatgcggtgaatgccatgttgtcttttgcatatacgttgatagccaatgatgttgcggccgctctcgaaactgttggccttgatccatacgtcgggtttctccatacactccgtccggggcgcacatcgttggccttagatatgatggaagagttacgtgcttaccttggcgaccgttttattttgtcgttgattaataaaagacagatttcagtaaaagacttcttgttccaaggtgataatggggttgttatgacagataaagggaaaaagacttttattactgcatggcaggcaaggaaaagggaagtgataattcatccttatcttaatgaaaaagttgaaatagggcttctgccttatgtgcaggctatgttaatggcaagatatatcaggcaggatattgacgattatccggtatttcttataaaatgatttttaattatgtacattcttgtgacttacgatgtggatactacaagcaaagagggggctcgccgtttacgatgtgtggccaaggcttgtctggattatggacagagggtgcagaactcagtctttgagtgtgtagtgacggaagcgcaatattctcttctaaaagggagagttagggatattattgatatgtctcttgatagtgttcgtttttatattcttagtaaaaatgagaataagagggtggaagtaataggtgttgaaacggcgtataaacttgaggaggctcttataatataatgcgaatgtggtgtgttacaaaaaaagtagtatcttcgcatgtgttaataatcagtagattaaattatttgtagggtatttctttgttatgaagttgaataataatgatgattcgcataacagtggattaaatttgctgatttataatatgttattagatatagagtcacaccctgcgtgggtgtgtggattgaaaccttcttgggaagcagcgcgagcagcacgtcctgtcacaccctgcgtgggtgtgtggattgaaacggaaaacaactaaatcaacatctaattctccattgtcacaccctgcgtgggtgtgtggattgaaactttactctctgtaatctttattattgacctagagtcacaccctgcgtgggtgtgtggattgaaacgattatgcaccctcgtcaaacggggcaagggattgtcacaccctgcgtgggtgtgtggattgaaacatattctgaacacattgcaaatgtacaaaaaggtcacaccctgcgtgggtgtgtggattgaaactgggaagcttgcgccggatacattatggacgttgtcacaccctgcgtgggtgtgtggattgaaacaatgacgaggtgaatacgtgtatagacaaccatagtcacaccctgcgtgggtgtatatggattgaagcattgttcactcgttggtcaagtttatggaagaattgtaagcattcggcctcttgtgtatttctcttcaagctgttataaaatcaaaagccaaacgaagtacgttaggcttttgactttgttatgactggaaaaaacacgcacaatcccggatgcttatcttttgtctgtcttcttttgtggtttcacctaggtgacaatacattggcatctaagtggagaggcgtagtcacccaagtgatacgcttgcttcaccttggtgaaactataaattcaactaagcgttccagagtaaatatattatattttttactatactattccttgttgtttatttgttatattgttgattattaatgtgttattgtctgtttgtgtcgattgtttttcttgtctttataagatatattaaaacataaactaacatggaaattggtataattgacctttgtaaacaaatagaagatcctagtatgaaccgcaagaaagtccataaaatggaaactagtatctatatatccattgctgctgtaatctgtgaggtccagtcctggaatgaaattgaggaatttggcaattcgaaaattgcttttttcaagagtcgcatacccggcctggagttcatccccagtcatgatacttttaacagattcttcagtatgataaagtccgattattttgagttgatcttccgtaattgggtaaaacgagtctgtctggaggtgaaaggcgttgtagctatagatggcaagctcatgcgtggtccaagccaatgtgatggagaacatactaggggaaaagaaggattcaaattatggatggtttccgcctggtctgccgctaatggaatttctttaggtcaggtgaaagtagatgacaaaaacaatgagattacagctattccattgttaattaactctttggaactaagtggttgtattgttacaattgacgcgatggggtgccagaaagatataacccagaccattattgggcatgatgcaaattatattatcgctataaaggagaataagaaaaaaattatcaaccggctaaacaaatcattgactattatcaggatagagatgaaataatcaatagagtcatcaggcatgtgtcggaaaatgccggacatggaaggattgagaaaagaacctgtactgtagtcggttatggatctataatggagaaaatgttcaagaagaaacttgtggggttgaagtctgttgtaaggataaagtcggaaagaacaatagtcgcaacaggggaatatactcaagaggtcagatactatgtaacttcacttgataatacccaaccggaggagattgcatctgccatcaggcagcattggtctattgagaataatcttcattggcaactggatgttacctttcgagaagactacagtaaaaaggtgaaaaatgctgccggaaacttttcggtggcaacaaagatggcgcttaccatgcttaagaatgagaaaacaacaaaaggaagtatgaatctgaaaagactaaataagtttttgtaactgaagtaaatagatacaggacacatcaagaaggaaaatctatgagccttcagaaacaatggtaaaaagacacatacataccggttaaggggaattacggaaccttttacaccacaaaccgttgaagataaatggtttgtggtgatggaaacaaaaaagaacagatgtctttttaatacgctatcttatccaatatcccgttcaagtgtgcaatagccactccataattagtcatgggaatctgttgcttacgggcattatcaatccggtttagtacatatttgcgattgaacatgcaggctccgcaatgaatgattaagtgatagggtgtcaaatcctccggaaagtctgtacctgcaacgatatctatttgcaactcttcacctatctttttacgcaacatacgtggaagctttactctgcctatgtcctcggtggcaggggcatgagtgcaggcttctgctatcaatacccgtgattgtggggtgaggcggtctatggctgaggctccttccatataatagagtatatcccctttatatcctgccatcagaacggaaaaagaggtgagaaggctttctgccggtttttgctcataaacggcatgaaaaacttgggagtcggttatgattagtttcggaggataggacagagcctgcaaagtggcggctattttatcggttgtacagctcattaccagacattttttgtccaataattcgcgcatcgtctgtacttgtggaagaataagtcggcctttgggagcctgtatgtcttgtggcatgactaagagcactaaatctccttctttaaccagatctccggtaatggtctgttgtccgaaatctgccggtaacttttccagaatagcttgaagtattttctctatgcccgtctgttcttttgcgctgataatgagaggactttgaccgcattctttttctatacaatcccttgtggatgctatgtcttttcggatatcagctttgttcagtatcaggataaccggaatattccttttatttaactgctccatccattgtttttcatcctcgcaattgccgtcttcacaaagaagtaaggcaatatctgtccgttcgatggctttcaacgtacgggttatgcgcatttctcccaattccccttcatcatcaaatccgggagtatcgataaagagacaaggaccgatatgttgaatttccatcgctttgctgacagcatctgttgttgtaccgggaatatccgatacaagggcggtgtcttgtccggtcaaggcattgattagagaggacttgccgctattgcgttttccgaacaggacgatatgtagccggttggcagcgggagtgttgtttagactcatattttattgggcttgaattaggttcattatctgtattgaaaaggttgcttgacgcatgagcggttagaatctgaaatctcgtttcccttcttctatctctttcagattacgaattgctatttcttttattttcggattgggaatatgttccaactctttttttatcagttggattcctttggctcgtgtatccggtgccgcataatcttctagatactcttttagtgtcatcaatgcattgggggcgcagcagttggcgatttgtcccgatttgactaatgacataaaacggtcgcctgtacgccctgcccgataacatgctgtacagaaactggggatatgccccaagtcgagcagccagttcactacctcgtccaaggtacgggtgtcactgatgtcgaattgtgctgagttttcttccggtgtttccggaatggcataaccgcctacgctggtccgggagcctccgctgatttgtgagattcccaggtttaagactttgcgtcgggttgcagccgattcccttgtagagataatcatacctgtataaggaacagcgatacggattaccgccacaattttacaaaatatatcatctgaaatggcatctgggaaatcttgcgtggagatatcatctgccggacagatgcgaggaacactgatggtatgtggtcccactccgaaggtagcttccagatgttcggcatgcatcaataatcctgtaaagtcatagcggtaggtattcagcccgaataaaacacctagtcctacatcgtcaattcccgcttccatggcacggtccatcgcttcggtatgataagcatatttgcttttcggaccggtgggatgcagggattcgtaattttctttatgataagtttcctggaacaggatataagtgccgatacctgcgtctttcagcttgcggtagttttccacggtagtggcggcaatgttgacattgacccggcggatagccccatttttatgtttgatgctataaatggtttggatagattccagtatgtactcaataggattccgcaacggatcttctcctgcttccagtgccaggcgtttgtgtcccatgtcttgcaaggcaattacctccttacggatctcttcttgtgtcagctttttgcgtgctatggtcttgttcttcaaatgataagggcagtagacgcatccgttcacacaataattggaaagatatagaggggcgaacattacaatacggttgccgtaaaacttatgtttgatttcctgtgccagccggaaaatgcgttctgttagatccggttggtcgcattccagcagtaatgctgcctcacgatgggacagtcctttgaattgagcagctttgtcaatcagttgctctatcagggcacgattgcttttgttgttgtgagcatactccaaggtatccagtatctcttgatggtctatgaattcttctgctattttagaatctgctttatacatgtttgttaggggttagtgatagtcacctctatctgtcgatatccggtaaccgattgtttccagttgttgtgccaaagctcgtaaaccttcggctgcttcggcaccgaaggcggctttgttatcatacaaggtgtatttttctctttgctccctgggggagagattgggcatcactacattagctcctgccaatattcctttttcccgtccgtccggtgacaaggtggcaagggcggtggtcgatggaatcagggcggacgggtgcattaaccggaaaagggataacaacttgagggtcattcctacacttccggccggctctgttccgaatggtgtgtcatgatgggggataaatggaccgataccgatcatttggggctggaattgctctatgaataacagatcttccaccagatgtgtcagggtttgtcccggagtgcctaccatgattcctgttccggtttgatatccaatttcttttagccattgcaggcattggagccgatgctttagtgacatctcctcaggatgtaatttcctatagtgttcttcgttgtgtgtttcgtgtcggagcagataacggttggctccggcacggaagaaacgttcgtatgcttcccgtgatttctctcctaatgaaagggtgatggcacaatcggggaattcacagtggatggcggcaacggttttttctatccattcatctgttaaggcagggtcttcaccgccttgcatcacgaaggtgcggaatccgagtgcatatccttcacggcaacattccaaaatggtttcacgctttaatgcgtaacgggtaatggcggtatttcctttccttattccgcaataatgacagttgttatgacatcggttgctcacctcgataagtccgcggataaatatcccattcccgaaatgtgccaaagtgacttccctggcctgttgctgtaaatacagtaaagtgccggtatcctgacaggagaggaggttggcatattcctcacctgtcaggctatggtagtgacgtaatttgtcaatcagtcgcttcatgcatacctttaatatgtttttttctgttttgccagttcctgtaccaattggcgttttccattgttgctgccgctgtgcgtactgggtcctgtgatacaaccaccctcgcaggccatcacttcgatgaattgtccgggagctttgcccgatttagcgtaggcgcgtaatgttccgatattcttcttgtttaaatcagatacctgtatggcattgattttgtccgcttccattttcaggaatgcctttacggctcccatcacgccgccggcttgtgcgaatccatgcgcttcgcgaacggaagagaattccatagcgtatggctgtacaatctccaggttaatctcgaaagcatcgaaaatagaggaaatctcttcgaatgtcatcacaaaatccacagcctcgtcacgttgagcttctttacgtttggctacacatggtccaacaaatacgatttttgcatcaggatacttctctttggctatacgtgcggcataatacataggcgagcctgtgccggaaacgtattttttcatatcggggatgtatttgttcaccagctcgatataggacgggcagcatgaggtagtcatgaatttctgtccttcttccagtttttctatcagttcatgcgcttcatgttctacggtggacatggctccttgtgctacttcaattatatcggtgaaaccgatttgtctgaatgcaccatatacttgttcgatagttgtgctgaattgtcccaaaatagatggcgcgacaatggctaccacttgttctcctttacggatgcgttgcaacacatcgaatgtctgggatatttcaaaaatggccccgaaaggacaggcattcatgcatttaccgcaataaatacatttattctcatcaatatgctctataccgtgttcatctttgctgatcgctttgacaggacaagattcctcgcagggaacgggaatatagacgattgcgtgataagggcagcttttgtggcagatgccgcaactgatgcaggtatcatggtcgatccatgccttgccggtgtcggcatgtacatgtacggctcctttgggacaattgtactggcaactgcgggcggtacatccccggcataagtcggtgatttcataattgatctgtacgcaggccgagcatgcttcgtctataacacacataatgttgtctttgggctttccattgtttgcacgttctatagcacgtgcggcatattcggatagtggagtgagctcatcggtttcatcatccatatccagccccagtagaggaagggatttgtatttccatacagcgcgttctttgtgtacgcagcaacgccctgcatgttttgaacgtcgggggctgagttctaatggcagacggtctattttgtctgttgtcagttctccgtttttccacaattttacaagttctgtcagcaatctgtggcggacaatcataatgttgttcgtaaatgccatatagttaaaggggttaattattaggttttgcaaagatagtgatagtttgtgtcctatggaaatattaaaaaaagaaaaatcacatttttctctttttatattcagattcgttctgtcgctgtggaatgtagccgactggtttatatatgaatctttgtaggtaaaaataataaatttcgtaaaagcaactgataatggcaggggaagaggaaaccattttagtgaaagatatgttatagctgtgccaatttggcagaataaaactgtcaatttctcctttttcatgtttggcacgtttttcgcaagatgttttgcgtcactgcttaaagatgacggataattgatataattaaaagtataacatataaaaattaagaactatgaacattaaaccattagcagacagagtattgattcttcctgctcctgcagaagaaaaaacaatcggtggtattattattcctgatacagcaaaggaaaaaccattgcaaggtgaagttgtcgcaataggtaacggaacaaaagatgaggagatggtgttgcatgtaggtgatcaggtattgtatggcaaatactcgggcactgaactggaacatgacggtaagaaataccttatcatgcgtcagagcgatgttctcgctgttttgggataattaaatagtacattgtaaatcattaaattgtaaatagaattatggctaaagatattaaattcaacattgatgcccgtgacgaattgaagaagggtgtagacgaattggctaacgcagtgaaagtaaccctgggtccgaaaggtcgtaatgtgattatcgaaaagaaattcggtgctcctcatatcactaaggatggcgtgactgtagctaaagaagtggaattggctgatgcatttcagaataccggtgcacagttggtgaaatctgttgcttcaaagacaggtgacgatgcaggtgacggtactactactgctactgtgctggctcaatcaatcgtaggggtaggtttgaagaatgttactgccggagcaaatccgatggatttgaaacgtggtatcgataaagctgttgccaaagtggttgaatctatcaagtctcaggccgaaatggtaggtgacaactatgacaagattgaacaagtggctgctgtttctgccaataacgatcctactatcggtaagttgattgcagacgctatgcgtaaagtttctaaagatggtgtgattactattgaagaagctaaaggaacggatactaccatcggtgtggtagaaggtatgcagttcgaccgtggttacttgtctgcttactttgtaactgatacagaaaagatggaatgtgtgatggaacatccgtacatcctgatttatgataagaagatttctaacttgaaggatttcttgcctatcctggaaccggctgtacagagcggacgtcctttgttggttatcgcagaagatgtagacagcgaagcattgactacgttggttgtaaaccgtctgcgttctcagttgaagatttgtgcagtgaaagctccgggcttcggcgaccgtcgtaaggctatgttggaagatattgccgtattgacaggtggtatcgttatcagcgaggaaaaaggtttgaagttggaacaagctactcttgaaatgttgggtacttgcgataaggtaactgtttctaaagataatactactatcgtaaacggtgcaggcgcaaaagaaaacattcaggaacgtatcaatcagattaaagctgaaataaagaatactacttcagattatgataaggaaaagttgcaggaacgtttggctaagttgtcaggtggtgtagctgttctttatgtaggtgccgcttctgaagttgaaatgaaggaaaagaaagaccgtgtggatgatgcattgtgtgctactcgtgcagctatcgaagaaggtatcgttccgggcggtggcgtagcttacatccgtgcttctgaagcattggaaggcctgaagggcgataatgaagacgaaacaaccggtatcgagattatcaagcgtgccatcgaggaaccgcttcgtcagattgttgccaatgcaggtaaggaaggtgcagtagtagtacagaaagtacgcgaaggtaaaggtgacttcggttacaatgcccgtactgatgtttacgaaaacttgcacgctgccggtgtggtagatcctgctaaggtaactcgtgtagctttggaaaatgccgcttctattgcaggtatgttcctgactacagaatgtgtaattgtggaaaagaaagaagataaaccagaaatgccgatgggtgctcccggaatgggtggcatgggcggcatgatgtaatctttgccccataaatgattaacggactccctgttggcgaaatgttgacagggagttttttatagaccatagtggattatcttctcaagttttatttactctctaaatttcggctcatccgagaaattatgttatgtgaggaaactgtggatcactcttaaaagattagtggggtttatttcaaattgaactgtcctataaaaaaggaagtgtttctgaacgttcagaaacacttccttttttagtgagcctcttgtcggattcgaaccaacgaccccgagattacaaatcacgtgctctggccaactgagctaaagaggcattgctttttgtttagcgggtgcaaaggtaagaatatcttttaaaagaacaaattttttcataggaaaaaatagttggaaattaccaaatggtaatttttactctgaaataacgctctatctttgcatccgctaaacaaaaaagtgaagtttatgaaggatagtattgattttggtagtatggaaattccgaaattgtttcggaaattgctgatacctactgtgctggggatggtattttcggctgtgtttgtgataacagatggtatttttgtaggtcaagggataggtagtgacgcattggcggcagtgaatattactgctcctttgtttttgataagtacgggtatcggactgatgtttggtgttggcgcatcggtggtggcatctattcatttatctcagggaaagttgaaaactgctcgtatcaatgtgacgcaggctgttgtgatttcttctttgtttttggctgtgctgtggggagtggtatgtttgtttgctccacaagtagccgtgtggttgggaagttcggaacgtctgttgcctttggcggtggaatatatgtattggttcttgccttttctggtatttagtgctttgctaagttcagggatgttctttgtccgtctggatggttctcctaattatgccatgttgtgtaatgctattccggcagtggtgaatatcctattggattatgtgttcatttttattctcaaatggggaatgatgggtgcggcgctggctaccagtctggggtatattttgggggccggaatgattgtagtctatttaagtcgcagaagaaatgtgattcatttttgccgggtgaaacttagcaagaagagtatgcggctcacttggcgcaatgtgaaatatatgtgccacttaggagtttccacctttttgtgcgaggcagccatagcctgtatgatgtttgcaggcaattatgtgtttattcattatttaggtgaagatggagtggctgctttcagtattgcctgttatttctttcccattatatttatggtatataatgccataggacaatcggctcaacccattttaagctataactttggagcgggtgataccatgcgggtacgttccgctttccgtctggcactgggaacggccgtgacctgcggacttgtgttttttgcgttaacagctttgttcaatcatcagattgtggctatgtttattgatcgttcctatccggcatacgatattgctgtggcgggactgcctttgtttgcgtctggttttattttttttgctgtaaacattgtttccattggctattttcaaagtgtagagcgggcacgtccggctatgatggttacagttttgcgtgggtttgtttttatggtactttgtttattgggcttgccgttgctattgaaggtgccagggatatggctggcggttcctttggcggaaatacttacttttttagtgataatggtaatttattatcgtaaacatcaatgggttcgcagatgattttttacttttgtagtaattaatcgggtggatatatggatgcattcatacagaagttttgtgaaaaatatagtttgccgatagctttgagcttgcagttgttggataatatggagaagttcacttttcataaaggggattttcttgtacaggaaggtgggcggaactcaaacttctatattgtaagtaaaggaatctggcgggggcattaccttaatgacggggtagatgtttccgtctggtttgcttctgaaggagaggccatcttctcgtcatggggatatgtggaaaatacagtttcgttggtttctatcgaagcgatgtgtgacagtgaactttatggtatttcgaaggcaaaactcgaagtattatatgccggatctgttgaactggctaattttggaagacgactgttcgagcagcagtttttagggcttgaaagttggatgataacgggaggaagcccccgggccaaggagcgttatcttactttgttggaagagaatccggaactgttgcagtatgtacctctgaagcatatcgcttcttatttatggattaccccacagtcgttaagccgtatccgtgccgaactggggagaaggaaaaaagaccaatgacaattttagcatttacggggttggttctttcgtatggaaacgcattgttctctttgctttttcttgtatggttcatctttgccttgatggatggtagaaaagttggcatccgataaatatttatcttaaaagtgtcatcgtattttatttttgtgtaagtttgtagtgaatcctaaaaaaacttatggcaatgatagatgatattttagagttcaacaagaaatttgttgagagcaagggatatgagaaatatattaccaacaaatatcctgataaaaaaatagctattctttcttgtatggatacccggttgacggaattgttacctgctgctttgggtatcaggaacggtgatgtaaaaattatcaagaatgcaggtggggttatctcgcatccgtttggtagtgtaatccgtagtctgatggtggctatttatgagttaggtgtaaaggaagttatggttgttgctcattctgattgtggagcctgtcacatgaatagtaatgagatgatagaacacatgaaagcacgtggcatcaagcaggaaaccattgatatgattcgtttctgtggtgtagattttggagcatggctggatggttttgaggatacggagaaatcggtgaaaggaactgtacgggctattatggagcatccattaatacctgaagatattatagtgaggggatttataattgattcggtgacgggtgaactgacaaaagtataaaatgtgagttttttatacacaataatgttcatgtgattttgggtattataagaaagggaggtatttctgcctgatgcagaatatacctctctttttattgaagtctgtatttgtttcagttttttattgagcgaaagcatgatgataaccatccactttgttccaattgccacgggtaaagtcgggtacggcaacaggtgcatttccgttttctatagaaagacgggtcaagtcggccatacagcaccattctgctaaatcataaacgtccatgtccaaaggaagtccgttgcgcaagcaatataccaggcgataatccataatgaagtccatccctccatgtccacctattttctttgctgtttcttctaattcttggtggataggatgtttgtattggctcatcaaagcttcttttactttttcgggaacagccgagtgcatactcaggttttcgtgatcgggtatgctggtgctgtcaatctgatccgggcggaaacaatattgctcgatgggatatttgttggcaaaacctttggtaccggtcagctgatacatacggctatagggacgtggattcattacatcatgctgtatgtggatggtttttccgttttctgtacggataaaagtcatggtatggtcgccgttttggaaatcgggtgcttcttctttctgatattgttttaccagttcgggaccggttacagctttggtgtccatggctaccagtgtcttcatgcggtcaccgcggtgaatgttgagcaattggcaggcagggcctaggccgtgtgtggcataaacgtctccacggaactcccggttgtaatccaaacgccagttgttccagtaataaggccagaattcttccagattatggatgtatgaaccttctacatggagcacttcgccgaaaagacctttttgtgccatattcaatgtcgtcagttcgaagaagtcgtaaacacagttttcaagttgcatacagtgtttacgggtcttttcggaagtattgataagtgcccagatttcatccagcgacatggcggcaggtacctcgatggctgcatgttttccatgttccatggcatagatacccatttcagtatggtgtttccagtctgttgcaatgtataccaagtcgatatcgtttcgctcgcacagttgtttccatgcatcttcgctgccggaatagagggcaggggcttccataccggcgttagttacaattttttgtgctttttccgcattttcaggcaataagtcgcaaagagcgacaattttagttcccggtatgtgcgtccaacgttctaccgcactgggaccacgcatgcccaaaccgatgaaacctacacgcacagtgtcaagtttaggagttgttagttcgattacatcctgttgtcccgcaggacgttcgggaactggaacttcaagaggcgcatactcttttgttgcagttgtttctttggggattggggtacagccggcgaggcatgataacgctataccgacgaagaaggtagataggtttttaatcatggttctgtttaattgaaatttataggttaatagtagattgttgcaaaaatagggaatatcgttggaaaaacctcataaaatcggcagattgcagcaactaaaattgattatttctatttctaacttttgagtttggtgcagatattatttttaaaaatcggtcaaggactttttgtctttctttgccttccttttcgtctacatcttttgtccaaagatttacacctgctttaagttcaataactcgttttacttcattttaagatttcatcagtcagttctccgatttcccaaaatgccaaggcgtaagctgtaacaaaaatttcgtgataaaaatccgtttcatctccataatcttcttttatgaatggaatttatttcttaattatttcagcacttgctccactatcatacaactccattatatattcataggtgtcgtgtgctaaatctccatcaattatttttactccgtctgttgccatttcaattttatgtttttactatcccgcttgccgataaatacacgcaatggattatttaaaatacgcaatacgtaaaaagtatattgcaagtgcgaagagttatctcgttctaaaggtactaattctttgggatacagacgttgttttccgtgtgaaactaatatcaacttactttgctttccttgattatcttgaaaaacataacaaaatttatggaacttcccttatgtggaaaagctattgccgttgattgacttctgccggaacacattgagattctcggaaagggtattttcaaataggtgtgaacgatgttccacttgtgcaatggtttaggtagaaagcgaatgaatggagaaacggtttggagactgcatctactaaacaggataaaggactgaaaatataggatgcaccctaaattctattctaaaagtaaataaaagcattagaagataaaagattatcagaaaaatatccgatttttgtagtcggataaagacaattatttccaagacatacgagaaaaaagaagcgttatgttcatcttgtaggttggaaacgtaggaaatctcggacttggtacaagaaatagtatagtggttctcacgctatagcgtgggctgttattatcatatctgtgccaaaggttgtctacgacctccaatttagacgcggtagcattgcagttccacgctctcgcattttataaccgcctataaagggactgataggcatcgaatagaatacatatatggaacaacagttttgtcaaagttgtggtatgcccctaactgatgaaaacagagggacaaatgccgatgggagcaatagtgaggattattgcgtgtattgttacaaaaaaggtgagtttacccaagattttacaatgagccaaatgattgagttctgcctgcaattcttagaccaatggaatgtgcagaccgaatgtaagttgagtcccgtacaagcaaaggaacaaatgcttcaacactttccctacctgaaacggtggaaagaaaaagatgaacggacactaatggaaaaggcaacccacttgcttgcccaatgtgaaaatgtgaccattgcatccattgatgccaacggttatccgcgacctgtgcagatgtccaagatacatgctaaaagttttaatgaagtctggatggtgacaagtgtcggctccatgaaagtgaatgattttaaggcgaacaacaaggcggggctttgctatgactattacggggatggcgttgccctgcgtggtacggtagaaattattacggacgatactatccgcaaggacatatggcaggattggttcattcatcattttcccgatggaccaagtgatcccaattatgtacttctacatttcattggtacggaagccaccttttggataaatggcgaattttctcactccaacatctgatatttatgagaacgattgtacctgataataaaaacatagccgcttgcggtctttattgtggagcttgccgtaagttcttggcagagaaatgtcccggatgtaaaccaaataaaaaggcaacttggtgtaaaatccgctcatgttgccaagaaaacaagtttaatacttgtgctgaatgctcccatgatgtcagggaatgcaagttgttttccaattggataagcaaagtatttgcatttctgtttaattctgaccgttccgcttgcattagctatattaaggaacaaggtgaacaagcctttgccgaagagatgacaaaacgtaaatgtcaaaccatcagaagaaaataaatatgaagaacgaggtattatatctattgttaaataactatgccgaccatgaagccgtgtttctggcttcggctattgcgtgtgacgaacgtagtataaaagaaaatcccaaatacacgaacaaagtcgtagctcctacattggatgttgtacgctcatgcagtggtttccatactttacccgactattcttttgaaacgatgcccaatgattatgccgcattggtactaattggtggtttcggctggctcgacgaactggaagcagataaagtcgtgccaatcgttcgccgtgccataaagaaagggattatcgtaggagctatctgcaatgctgcttctttccttgccaaacatggtttcttaaatgagataaaacatacgggaaatggtttggaacagctacaattatggggaggaggcaactataccaataaggcaggttatatgaatgagcaagctgtgtcggacaaacgcattgttacggcaaatggcacaggttacttggaatttgctaaagaattgttgctattgctggagaatgatacgcctgaacaaatagaaatgttttactgcttcaacaaagaaggattggtaaagctgttcagtcaattaccttgattgtatggatttgccagattggttcaaaggttttgagaaaggtatagcccgactctcatcggaacaacgagcagccttcttttcggaatgtagcaagaattgcgtggatggtggtgtgctttccatttacaggaaactctacaaggatgccaatggagatatggatgttttcttccagatggcaaatgaattgccgggagtaaaaagcgagattgtagagaaaggtcgtgtctatcatcttattgcctgccatatttacatccttaaaagttacccaaacctgcaaagtgatgcagatcacggtaattaggacggttgccacctcattatcctaaaatgaggtgaattttctacctctttgatttcaaagaggtatattctttttgcagaaatacaatatatttttaatattagtgtattgcttgtcggataaattgatttcacttatactgtatttataataaaaaagcagtcttgacttttcaagactgcttttttattataatggtaattcaattccctcaatcaaaaagtacggtttttatttaggtctataaccatacattaatgcggcattaatttcaatagccctcatatatcctttgaaaaaactttttactcttttcatcctgttacctttttttaaaacgttaaaaactaatcctttgtatcttttactttgtatcgtacccccaagcacggagggcgtcatttcccatatctttgagacctgctttgatgatctccttcaacttcttcataatgttatcctttctttgattaaaaaatagggttgttttcttacttaatccctataccccaagcttttacttcgttttcacccatcatagcaagggctttcttaaaaatactttttacctttttcataatctcgttatcctttctttttatgttttacaacacaaaattatgctgttttgttctagattgtactctgataaagataaaatgtatgcaaaagtggcaaattcttgacctgcatcaagaatttgccacttttcattaaaaaactatttcagaagcccagcttctgaaattcattctcaaaattaggtgtaaatatttctttcccaatattgcttctgatctcttctagtgaccaaaaacggccgccatccagttcctcgctgggaataatgggaccgtcataagtggttttatgtgagaataccaattctttttcccgggtggattcgaatacatagctagtcagtaattcgggagtaaagtcggtgatgcccagttcttcttttacttcacgtttcaaggctgtttccacattttcacttaaatctatgtgtccgcctacggctgtgtcccatttgcctggttggatatctttccagtcaggacgcttttgcaaatagagttcgcctttactgttgaatacatgtaagtggactaccggatgtagcaatttacttccattatgacattctccacgggttgcagctcctgttatgtttccttgttcatctactataggaaacatttcttctttattatcgtaattcatcttcgctatttttttgttactgcaaagatatgaattcgggctcggattatatggatcttatagtctttaatagtaaaaagggatgtgagacctttataatccgagtccgaaataccgtttaataatttacttgatgccgttttaaaaaagctactgttttatgtatttccttatacatcacaatatcttcttttataaaaggtacctcgttgcggtaggtggcgagaaacttttcaataaacggtgaactgcggagcgggcggcggaaatccagtccttgtgcggcgttcatcaattcgatggcaagtatatgttccagattatccatcactttgtagagcttggtggcggcgttggctcccatacttacatggtcttcctgtccgttgctggatactatggagtcgctgctggcggcataacagtacattttattctggcttaccatgctggcagccgcatattggggaatcatgaaaccggaattaagtcccggattggcaaccagaaattcgggcaatccgcgaagtcccataatgagttgtgccacacgtcgttcggatatgtttcccagttcggccatagcaatggcaagataatcatataccagtgccaggggctgtccgtggaagttgccacctgaaatgataaggtcttcatcggggaagatagtggggttatcggtaactgaatttatctcggtcaacagtactgaagctacgtggttgatggcatctttggtagcaccatgaacttgtgggatgcaacggaacgaataggggtcttgtacgtgttgtttgggctgtgcgatgatttcactgccttccagtattcttcggaatgcggctccggtttctatctggcctttatgcggacgcatttgttggatacagtccatgaacggatcgatgcggccgtcaaaggcttccagggagatggcggcaatgaggtcggctttcttggaaagacggaaggctttgagtatggcatacactccgttggcactcataaactgggtaccattgagcaaggccagtccttctttgcttttcaatttgactggttcccaaccaaactcatcaagcacgctgatagcttcgcagcgtttgcctttataatatacgtcgcctacgccgattaacggaaggaagagattggcgagcggggcaagatctcctgaggctcccaatgaaccgcggtcgtagacaatgggcattacatcgttattgaaaaagtcgataatgcgctgtacagtaatgacttgtacgccactgtgtcccaaagaaagagcatgagcttttaataaaaacatcagcttcacaatgacatggggcatttctgcgcctacactgcaagcatggcttttcaccaggttctcttgcaaagtactcagttcatcggaagaaatattacggttgcacaggctgccgaatcctgtcgtgatgccatagagaggaacatcggattccttgatctttctgtccaggtaattccggcatttctgaatccggtctttagcttcaggagccagttccaatttcagattttcattgataatacgttcgatgatgtcaaaagtgaggtcacccgaacctatttgatatacattcttcatggtctgattctttttttaaccgcggaggttgggattaaaaaatggttttcacatagtccagtattttctgttcttcggcaatggtcgtctgttctatcatatcagcctcttcactcatctctttgacgaatttttcgtctttgatagaagtgaggttaatacgtacattcagcaaggctcccagaatggcagtccgggcacacatcatggacacgcaggcatcggttacagcgttgctgttcccttttctggctaccacatcaatcatgggcagaatggaatggacggtacgtgccacctccataggcacttgggcggcatatttggtttccttctgtatggcttcactgcggatagccttttcttcatccgtttctttcggaagtttgaatgcagagaaaacacggtcgtatgcttccgaatcacggtctacatcggttatcagctggcgggtgagctcttcgaaacgaacagaaagatcttccataatttcgttcacttctacatatttcttgcggcctatggtaagattggctaccatagctgccagtgaggtggcaagggctccattgagtgccgagacactgccgccaccggggacaggatcattactgagtactttattgataaattctttgatggtaagttctgttaacatggctattagtatttaattggttaatttgaatgtagaatacgtccccctttgatggtcagcttcactgcgttcatacctgtataataaggtaatatatgggggttgtcggttcccagtaaaacaaagtctccctgttttccggcttctatgcttccgatgcggtcggcgcgtccgagggctgccgcaccgttcagtgtgatggctgtgatagcttcggcaacggtcagtttcatatagatgcaggccagagcaaaagtcagcgggatggatccggagaaacagctgcctggatttagatcggtggcaagggctacggcacagccgctgtctatcattttcctgccacgggcgtagggctcttttagggtaaaggcagttagtggcaacagagtggctactacattattttgtgccagggcttttatgccttcatcggatgcttgcaacagatggtcggcgctgagggccttcaattctcctgccagttctgctcctccaaagctgacaatttcatcagcgtgtagcttggcgccgaagcctagagcttgcgcagctttcaatagctttcgagactgttccacagtgaatactcctttttcacagaaaatatcgcaattttcggccaattgtttctgatggatcatgggcaacatttcgttaatcagaaaatcaatatatgcgtcacttcgccctttgtattcttcgggtaaggcgtgagcacctaaaaaagtggtggcgatatctactttccggtcgggacattcattgatagcttgcatgacactgagctgtttcagttctgtatcacgatccaggccatatccgctttttccttccactgtggtgacccccatccggctcatggtatccagaaaccattcggctttatgtttcagttcctcaaaggaggcttcccgggtggcacgtacagtattgataatgcctccgccacgttccatgatgctcatataactgtcgccgttgagccgccagatgaattcgtcggggcgaaatcctccgaaaaccaaatgggtatgagagtcaacgaatcccggcaacaatacattccctctggcgtcaagcactttatagccgggcttttcatggcttatacggttttcgccaacataggtaataatgccgtcggttactcttaccgttccgcaaggaatgttgagaagttcgttcatggcttctcctttccgggcggttctgccttgcggagtaacgatgtgggcattgatgataatcaagttgttgctcatagttgttagttttaatggaacgcaaatgacgcaaatgacacaaatatcaatggtgactgaatatttttcttttaaattcaggatgctttccgaagtttaatagatagcctatctctatgtctgtggctttcagatagtttatcagttgaaattcatgttcgggacgtaaagcatcagccgctttcagttctaatatgatggagttgttgatcaccatgtcggcataatattcacccactttatgatttttataaaatacattgatttgcttttgcacttcacatttaaaaccttgctctatcaattcaaagtagagggcattttgataaaccctttccaagaatccatatcctaatgtgttgtacactagataaaatgcttttaatattttatctacatcttcttgacttgctatttgcgtcatttgtgtcatttgcgttctattctatattattccataatctgcgcttccagcacttgttgcatggagaagttttccaatcccaggtagtaagaggcagtgtctatcaaggcctccataggaacaagtcctacgatttcgctgccgatgatgcttactccgtagcgtttggattcaaaacgtaccatttcgaatgcccggtagatagcggttttgctatagtcggtaagattcatggatacctgggtgataccccggtccttcagttctacgcccatggccttgcaatagcgcagtccgccaccgataaaacggattttcttggcaatgtcatgcgctatttccaggctgggagtattgagatttatattgtaggccactaagggcatacgggctccgatggctacagttccggcagtggggtgacgttccgcaggaccaaaatcgggatgccattcgggttggtgaatcttttccttcattccctcgaattctcctttacggatggcagcgagattttcacgatgtggtgcactagctgatttttcatacaagaatacagggagattatattgagaggccacccgttgccccacttctttggacaccgctatggcatcttccatggtacatcctttgatgggaatgaatggaactacatctacagctcccatacgggggtgctgtccttggtgatggttcaggtcaatcagttctactgctataccgatagcttctatcacggcttctttcaaggcgtccggctctccaacaacggtaactaccagccggttgtggtcttcatcgttactataatccaataattttacgcctgccttggcacgaaacggagatacaatctcgtctattttctgtaagtcacgtccctcgctgaagttggggacgcattccataatttttgtccagctcatactctttagaatttggtttatagggaacatccatggatgcggatgaatgaaacagttgcatccatggtgttccggtttttggttagttgattcctttatttttcaataccttattaataaggtcatcttccgctatatgcggcagggtgatgtgataaccatcggcatggctctcgttgaattccgccgaagtttccatggcatgcgggttgcgtgcccacgagcggcgtgccactcctcccattacatcccataacatggatgagcggagaatacggtctacccgttcactgccgtcgcataccattccgaatccgccattgatggctttacctatacctacaccgcctccattgtgcaaagcgacaaggctcatgccccgggcacaatttccggcaaagcattgcacagccatatctgccattacattgctgccgtccttgatattggaggtttcccggaaaggagagtcggtaccgcttacatcgtggtggtcacgtcccaacatgataggacctacctcgccccggcgtaccatttcattgaaacgcagtgcgatattcatacggcccagcgcgtcttgatacagaatgcgtgcttgggtccctaccaccaggttattcttttcggcgtcgcgaatccatatccagttgtccatatcctgtccgcggcgatctttagggatacactccatagcggcacggtcggtctttatcaaatcttcctttttcccgctcaggcatacccagcggaaggggccgtaaccataatcgaaaagttgaggccccatgatatcctctacataggacggccagatgaatccatccttctcgtctgttccattgcgtgagatttctttcactccggcgtcataaatcgctttcatgaaagaattgccataatcgaagaaataagtgccccgtgccaccagttccttgataacatggaaatggcggcgcaaagtttcgttcaccatttcatcgaaagtttctctgtcttctttcagcatacgggtacgttcttcgaaggaaatgcctgcaggacaatagccgccttcgtaaacggcgtggcaggaagtctggtcactgagaagttcgatgtggatgttgtgatgcaatgcatactccaacagattgactacattgccatggtaggctatggaacaggggattcgtcggtctatggcatcggcagccagccggtaggcttcagacaaatcggatgtgatatgctgtacccacccttggcggtggcgggtttctatgcgtgaataatccacctcggctataatggccactgctccggctatctcggctgctttgggttgggctccgctcattccgcccaatccggaggatacgaaaagatggccgttcaggttgccgtcctgcggcactcctaatttcatgcggccggcatttaatagggtgttgaacgtgccgtgtacaataccttgcggaccgatgtacatccagcctccggcggtcatctgtccataattggctactcccatctgtgcggctatttcccagtctttctggttgtcgaacatgcctaccatcatggaattggtgataataacacggggagcttcgggatgtgatttgaataatcccaacgggtggccgctttctacgaccagggtttgttcattcgtcattacctccagatactgcttgataagccggtattgcatccagttttgacaaacttgtccggtttcgccgtaagtcaccagttcgtaaggatagagggcgatatcaaatgaaaggttgttgtctatcattacttgaaacgcttttccttcgatacagtttcctttatattcgtcaatgggctttgctttcaagtcaccttcgggccggaagcggtaaccgtagattttaccccgggtgagcagttcatccatcaattcgggagcaagttgctcatgcagttccaccggaatgtatcgcaatgcattcctcaatgccgtttccgtttgggcgggtgtcaagcggtagccccggtcgggagcacggcggatgccttccgtgaatgtaggataggcaggtaaatcagtagatagagtgatagtcatagtatgtaagtgttttgtcacaaagatagcaaaatgattggaatactatgggtttggagatatgtttagtgacataaagttgttttttatctatagacttgatgtaaaggtaaacgcacacggatataaaaagcttgccataatgacaaagtaggttgcctgttcttgtgtatagtaaataaagggggcggtagaaatttagtggaagctggttcttattttcccgtttatatctttctttggatttttttaagtaagaacctaccggcggaataaatgaatgtctatcatatcacagcctattgcataagttttttctttctccaaattaagcctttttatacggatgtattctatctccatagcctttggagttatctccataagctttggagttaactcccaagccttgggagataactcccaaggcttgcggagataaaacaagcaggaagaaaagccttagccatatagtagaaaacgtttggtgatacggaaaaaaggctttatatccgtgatgaagtcttagggtatcagcagcgaactgtctccgtagctcagaaacctgaaatcatggcccagtgcataatcataaatccttcgccagtttcctttcacaaaggcggaaaccaatagcagcaatgtactttgcggctgatggaaattggtaaccattttcttgactattttgtatgtatatcccggcgcgatgataatctgagtactgctatgcaacgcttccatttcgtgtcggttcagataatccagaatctgttgcagtgcttccaccggagtcaggtcattcttatcttcgtagggcatccattgctgtacatgcaattcgtcctgagtggcatcgggattgtggctgataaggacgccgatataataaagactttccagggtacgtaccgaagtggttcctaccgcaatggcttttccattatgggcgattagtttttcaatggtatgcttgcttacagaaatgtattccgtatgcatttcatgtccttctatctcttcactttttacgggcttgaaagttcctgcacctacgtgtaaagtcagttcctcacggtcaattccccgttcgtccagcgctgccagtactctttccgtaaaatgaagtcctgcggtgggagcggcgacagaaccttttattttggagtaaaccgtctgataagtttccttgtcgctttcttgtgtctcacggttcagatagggagggatgggcagttcacctgccacttccagcaggtcggcaaaggtgattgtgtcatcatcccatgagaaatcaatccaatggctggttcccttgcactctccacgggtggcggacaggactatttgtttgccttttacatttactatgcggctcaacgtactttctttccattttttcagattacctatcatgcataaccagctgcattggcgtgtttgctggaagtttaacacatagtcattgggctggacaggttccaggcagaatacttctattaatgctccggtttctttacggaaatgcagacgggcttgaatcactttggtattattgaatatcatcagttctccggattccagatagtgtggcaaagacgtaaagatgtcttcgctcacttcgccgtggcggtaaactagcagtttggactggtcgcgcgtggcaagggggaatttggcgatccgttcatcgggtagcgggtagttgaactcacttattttgatatgtttggtatcttccatctgaatctatttctttttctgcgcaaaagtaccgatatttgcgctaactaaaaaagaaaagagtatgaaaataggagataaagtccgtttccttagtgaggtagggggcggtgttgtgaccggatttcaaggaaaagatatggttttggtagaagatgccgatggcttcgatattccgatgcccataaaggagtgtgtggtgattgacacggatgattataatatgaagcgtaaacctgttgctccggctcctaaacaggaggttgccggtgcaaaggcaaaaggagcgtcagtcaaggtgcgtccggatgaagaggaggatgaacgtcctgtcacttatcgcccggctgagcgaaagggaggggatattctgaatgtgatgctggcttttgtgccacaggatctcaaagctatttctgcaacggcatttgatgcatatcttatcaacgacagcaatttcaccttatactttacttatcttacagccgaaggtagtaactggcgggtgcgcagccatggcatggtggaaccgaatacgaagttttatatcgaggagttcgagaaaagcgttttgaatgaattggaacgggtggccgtgcagcttatcgcttttaaggataacaagagttttctgttcaagcctgccgtgtctgtggaattgcgcatagatacagtgaagttttataaattgcatactttccgtgagagtattttctttgaggagccgtcacttatttacgatatagtgaaaaatgatgttccggtaaaacaggtgtttgtttcggcagatgatataaaagatgcattattgcaaaaaaaagtgccggaaccgcaggtagcgaagcagccccagcagaaaaaggtgaagaacgatatcatggaggttgatctccatgctcatgagttactggatacgactgccggtatgagcaacagcgagatattgaattatcaattggacgtttttcgtaagactttggaagaatgcaagaacaagaagggacagaagattgtctttattcatggtaagggggatggtgtgttacgcaaagctatcctgcaggagttaaaatataaatataaaaactatgaaagtcaggatgcttcgttccgtgaatatggtttcggggctaccatggtgattattcattaagactttcttattcatataaattgtgatatggcaacattaaaagaatttttgaaagcggatcgttttgctacttgtgcgggagtggaacttcttgagataaagccggggtatgcccgtgcgtgtatggaggtgaccgaccggcatttgaatggtggaggagtatgtcaaggcggcgccttgtttacattggccgatctggcttttgcagctgtagcgaacagccgtaagaaacttacactttctgtgaatgccaatattacttttctccgtcctgctaagttgggttacgtgtatgctgaggctgttgaagtatttaatcatcatcgtattccttttgttgaagtaaagataacagacggacagggggagctgatagctgtatttacttcatcggggtatcgtaaagagtctgatttgccggtagatgcgttagaataatttataatagataaaagcctgttgttgaaagaaggcaacaggcttttaaaatgatggttatcagtgaagacaagggggcttatccttctttgactttagcctttcctattcttcccggttctacgaataaatatttgtagcctgcgcgtatgcttgccagatgcagtttttccaaacgcgcacggcggacaagcaaagctgtcatttcatgaatacgtccgttagcataacctatcatttcgttctcggtcgtatcttcagaaccgtaagtgcctgctccttggacgatcataaaaggtgattcggtgcctgctttatccatcccgacagcaatagccacataaatccacataggaccatgagcaactactttacgtgctgtggctgtgcggctttcgccttttgtcagtgtcttgtggcaacagccttctatggatttgattttctttcccaaatcatatacggttactttgtcatcggcagcatccaaaggttgctcgaacaaaattgtgtcttttttgtccggatagctgatgtgataacattcatattccggttgcattcctctaggttcgtcatcgcccacggaacctgctacaagtttaacttcaagaaatgagccgttcagggcggtttcatataccgcatccgtcaaagcggcgttactggttaattctaattctttcataagtcaaggtttttaataagtttctctcataacagtaggtggaaagaaaagttcgaaatagtgtgataaggaacaaaaacgggtgttaatagatgaaataaggagattggtcgataactcttgttccaatgatgataaagctttaattttacttttggaaaaagaaaaagtttgagaatcaagatcgggtagtagaaaggtagacggattattagtttgtctggatagagggattgatatagttgtaggaaggatatgaagaggcagtttataaatacgttaataataagtttgttagtaaataaggtcggctgaggctttgtttataaggaaaacgctcgttgtgaaacgggcgtttttgattttgcatcagtatgtgtttaaaagtaaatcttatactataaacgacgttctactccgtgaagaatagaacgtcgttttatagaatggaatgaagtttacaaacgatagtcagctaaatcatctgctttgaatttacggatgaaattgaaatgcttttctatttcagcttctgcatagtttacatatacatgggccgacttggcgaacaattcaggtgcttttgtcgcatcttggataagaagatgtgacatgatacatacggcagccatttcataaagacggcgtgcaacgaaatcaagtaactcttgattctgggcctcttttaccgcattggtgcatgcgtcaaatttgttggccatttctttcacgcggtccatcagcggttgcatatcttcactgcaaggaatagcttcataattacgcaaggttgcgatataagaaccgttggttacataacggatagcggctacagtctgcaactgggtcgttccttcgtaaatgctggtgatgcgtgcatcgcgatagatacgctggcaagcatattccatcatgaaacctgaaccaccgtgaatctggatacaatcgtatgcattctggttggcatattcagagttcatacccttggaaagcggagtaaaactgtctgctagcttggcgtagactttttgttcctgacgttcttcaggagtcagtttgcgttcgcgggcaatatcatccaatgctttgtaaatatccacatagcgtgaagtctggtaaagcaatgcacggcctgcatccagtttggctttcatgatagacagcatgtcatatactgccgggaaatcgatgatggcttttccgaactgcttacgttctttggcgtatgccaatccttcgttgtaagcagcttgtgacaaacctactgactgggcagcgatacccagacgcgcaccattcatcaatgccataacgtattttatcaaaccgagcttacggtcaccgcaaagttcggctttcgcgttcttgtaaaccagttcgcaggtaggagagccgtggatacctaatttattttcgatgcggcgtacatctacacctccttcgtttttgtcatagatgaacatagacaaaccacgtccgtctttggttccttcttcgctacgtgccaataccaggtgaagattagcgtcaccgttagtgatgaaacgtttcacaccgttcagacgccagcagttgttggcttcatcgaaagtagctttcagcattactgactgaaggtcggaaccggcatcgggttcggtcaagtccatagacatggtttcacctgcacaaatacggggaatgaaacggctgtgctggtcttcgttaccgaattcatacagcgtttcaatacagtcttgcaaagaccagatgtttccgaaacctgcatcggcggcggcaacaatttccgcgcacatggtgtagggggtgatggggaagttcaagccaccgaaacgacggggcatggtcatgccgttcagtccggctttgaccatcgcatccaggttttgtttggttcctgaagcatattccacacgtccgtttccgcagtgaggaccttcttcgtccactccttcggcattgggagcgatggtttcacctgtaatctcacctgtgatttccagaattttatcgtaagagtccatggcatcggcataatcctgcggtgcatagtcgaactcgtctttatctctatagtcgcgctctttcagttggcagatgcgctccatcatcggattgttcaagtgatacttgagttccggtatatcggtataaaagtttgccataatttttagtagttagagtggttaatagtagctaagggtagttaagtagtgggtggcgatacatttttcaacaaggctatgcagtaggcgtttagcaggcggctgatttcggccgcttgtatgcctaattgttctttgtcttgcaatgtgatgtatcctaaatctttcgacaggataatgaaattgcgtgtttcttccaacgaaccttgtgaaatgttatagaaacgcagtttgtcctttgagctgattttagcatatccttccgctatatttgcagtgatagaggctgctgcacggcgcatctggttaaccaagcagaataattcctctttgggatattgcttggttattttgtaaatggccaatacatacgaatgtgccttttgccaaacaatcagttgttcaaaggattgacttttcatttttttctactttgactacttatgactactactgactactttgaattctttttataatacttaatcaatttcggaacgacttcttccacagtgccgttaatcacataatcggcaatggtgttgatcggagcgttcgggtcactgtttacagagatgatgatacctgcatcctgcatacctgcgatgtgctggatttgtccggagataccgcaagcaatatacagtttgggacggacggttacacccgtctggccaatctggcggtcatggtctgcataacctgcatcgacagctgcacggctggcacctacttcggcgtgaagttctttggccagttcgaacaatttgtcaaaaccttctttagatcccatgccatagcctccggcaatcacgataggtgcgcctttcaggttatgtttggctttttctacgtgacggtcaatgactttgactacatagtctgtttcaggaacaaacttggcaacgtcgtggttcaccacttcacccttataattttcatccagaatctctttcttcatcactccctcacgaacggtcgccatctgtgggcggtgctcggggttgacaatggttgcaacgatgttaccaccgaaggcgggacgaatctgatacaacagattttcataggtgatgccgttcttcttgtcttcgtgggtaccgatttccaactgggtacagtcggcagtcagtccgctggtcaatgcggaagatacacgcggtcccagatcgcggccgataacagtagcgcccatcagacagatttgtggtttttcctctttgaacagattcaccaaaatggaagtgtggggcagtgaagtataagggaacagacccggagcatcgaatacatgaagtttgtctactccgtagggcaatacttgtttttcaattcctgcaaggccggttccggcagcgattgcctcaagctggcatcctaactgattagctaatttacgacctttggttaaaagttcgagactcacatcggccactgttgtgccttcaatctcgcaatatacaaatacattattcataatcgttatcctattgtatggttagctaacagttcgacaatcaatccttccacatcctggtcgcttcctgtcatggtcttgctttcttttgcctggaagacgatgttttcaatcttcttcactttggtgggagagcctgacagaccgcactgcttggtgtctccttctacatcggccacactccattcagtgatattcaggtaagggaatttctcatatagttcagcgtaaggcagttcagaaccgtctttagtgatggctgctttttcctgtgcgccgagagcgcgtttgtatttctgtaacaatttggcattgcgcggacggcagggagctgcacttccgtttacagtcagtacaataggcagaggaccttccacagtttctacccctccgtcaatgtggcgttttacggtgatgcggcgggcagtttcgtccacgtttagaatttcttcggtgtaagtaatctggcttaatcccagcttttctgctacctgcggacctacctgtgcggtatcaccgtcgatagcttgacggccaccgataatcaggtcacattcgcctattttgcggatagccgtagcgatggcgtatgaagtggccaacgtgtcagcaccggcaaaagcacggtcggtcaataaatatccattgtctgctcctctgtataaaccttcacgaatgatttcggcagcgcgtccgggacccatggtcaggatagttaccgtagaaccgggatgtgtgtctttcagtctgagtgcctgttccaaggcgttcaggtcttccggattgaagatggccggaagtgccgcacggttgatagtaccgtcagcgttcatggcatctttccccacattgcgtgtgtcgggaacttgttttgccagtactacaatttttaaactcatatactttaatatatttggtattagtaatattctggcgacaaatttacttaaacaatttgagcaacaaaaggatatgaggagaaaatatgcacaaagttatgctgtttgcgcaatggttttgctgtttttttgtaactttcggcacaattaatggatatttatagcgttttgtttgttatgatttaaaataaatgaaaaaggaattatgaagaaagtattgtttttattcgcctttttgcttctgggtataggagctatggcacaaaaggtaatttatgatgaaaccaaccagaccggagtgcgtacagtggtatgcgagggtatgaatctgggtgtttccaataatatggacgtatatgtggcactcgctggatttcagtataaaagtaccatacgttattcgctggctgttactatcgggtcggggcatgaggtggaaattcctaatgacagtaagtgtgtcctgacgttggataatggaaaggcattagagctgcctacggtagcaggtggcgcttctgtattgcagcatgtagatgtggagatgagtgatgtgtatcaaagtttccgccgttttgcctattataatataaaggctaaagaattgaagaaaatcggcaaaaacggtatcgtacaaatggatatacagttatctcccggaaactattccattgcattcaaccaggatgtcttgggaagtatgctgaccggctctatgtcattaataaataatatgtttgggaaataacttctcttttcatattgtatggtgcagccttttcttctcagaaggagaggctgtcttgtttttgaaagtcaaagggttaaacaaaacgttgtttcatgtgttttcctaatgttttttaatgtgataaacttatgaggaaaatacgtagatggggagtatggctccttttaatcattcctttggcactgaatgcccagcagcgggccgaaaaattattgaatgtacccttgccggaacattggcaagaagaggatgcgatgtttcaacaactgcttccggtggatgaccattggtggactgtatttcaggatgccacactggattcattgattcatgtggctgtcaggcagaatccgtctgtccttacagccttgaatcgtatagatatggcgaaagcgaatctgaggatagccagaggaggctattatccggctttgtcattggatgccgggtggaaccgccaacagactagtggcaataccggtacgggacagcctcaatccagagtggggtattatgatgcaacggttaatatgagctggcaggtggatgtgttcggttccatccgccaacgggtgaaagcgcagaaagaaaattttgcggcaagtcgtgaagagtacaatgcgacgatggtaagtctttgtgcagaagtggcgtcagcctattttaatttgcgtgaggcccaacaggaacttagtgtgttacagcgcaatgctttatctcaaaaggcggtggtggatataactgaagtgcgttataataccggactggcttccaaactggatgtggctcaggctaaatcggtttattatagtacattggcttctattcctgctacagaatccggtattattcaatatatgaatgcgttggctgtattgctcgggctttatcctcaggatgtgacggctgcactggaaacgggaaaaccgttacccgattatatagagccggtaggggtcggtcttcccggacaattacttttacgacgtcccgatgtacgggttgccgaacgtcaagtcaatgcacaagcagccttgttgggagcttccaagaccgattggcttccctcattttttctgaacggttccttcggctatgcttcacatgatatgaaagattttactagacgtagcagtatgacatggagtatcgctccctctatgagctggacgatttttaatggtggccagcgtgcgaataatgtacgcttgcagcgtgcacaactggatgaaacaatcaatcagttcaatactacggttcttacagcggtgcaggaggtggataatgccatgagtagttataagaattccatcaaacagattgtagcatgtcgtgagatgttgaatcaggggaaagaggcatttaaactttcattggacttatataaacaggggctgagccctttccaaaatgtattggatgcacagcgttcgttactgtcatacgagaattcattggtgcaggcacagggatattcattgctttgtctgattcagatgtatcaggcattgggaggaggctggtaggctgcgacggaaaagctgttgaactatagaaataataaaaacctaacccaagatatgaaaaaaataatgatagctttcgcatggacggtatgtgtgttgaccgcctgcgataaaaataaaccttctcagacagaaatgcaggcattgcctgtagatgttgcgaaacctttggtggaaaatgtgacgctgaccaaagattatcccggttatctggaagcggaatctactgtagatttggtgggacgagtaaatggaactttacaatccaagaattttgcacctggttcccgggtacgtcagggacaggtattgttcgttatagaaccgacactttatgaaaattcagtgaaacaagcggaagctgaattaaaaacggctaaagccaatcttgaatatgctgtcagtagttatcaacgtatgaaagaagcgataaaaagtgatgcggtgagccgtatacaatatttacaggcggaaagtcatgtgtcggcttgtgaggctgccgtaagtaatgctgaagcagctttgaaaactgcgcgtaccaacttgagttattgctatgtcaaggctccttgtgacggagtggttgatgtttcggcttattctgtcggggcgtatattggtggtgctttgcaaccggttaaattggctactgtttataaggataaccgtatgtattcctattttaatattgcagataaccaatatctgacatacgagctggcccaggaggctgctagcaagattcctgcggaaactcattttgtaaccttgcgtttgggaactgacggggcacagtcatggaaagcgaaactggattatctttctcccaatgtgacattaactacaggtactctccgtttgcgtgcggaattggataaccctgacgggatgcttcgtcccggattatttgtcagtgtcaccttaccatacggtgaagcgcggaatgcagtgttggttaatgatgcttctatcggaacagaccagttgggtaaatatttgtatgtagtgaatgacagtgatatagtgaattatcggcatattgaagtcgggcagttggcggatcataatatgcgtgttgtaaaaagtggcttgtcaccttccgaacgttatgtcaccaaggcattgttgaaagtgcgtcaaggcatgaaaattaaaccgatagaacaaaccaataaacttcaatagccttatgttttcaaaatttttcatagaacggcctatatttgccacggtgctggctttgttattcgtggtggccggacttgtaaccctgaatatattgcccgtggcgcaatatcccgatattacgcctcctaccgtgcaagtcagtgcggtatatccgggtgccaatgctgaaactgtagctcaaactgtcggtatccccattgaacagcaggtaaacggtgtggacggaatgttgtatatgagttccaattcctctgcatcgggcgcttattcgctgacagtgactttcgaagtgggaacggatatcgatatggcaactgtgatggtacaaaaccgtgtcagtgtagcattgaattctttacccgaagctgtgaaggtacagggagtgacggtgcagaagcagtcatccaatattgtgatgatgcttacactgagtggtgacagtatttatgatggcctttatctgaccaattatgccaatttgaatctggtagaccagttgacacgtgtaccaggggtaggagcggtggatgtcatgggagccggtgattattccatgcgcgtatggctgaatcctgaaaccatgcgtatccgcaatattaccccgcagcaggtttatgctgccattcaaagtcagaatatggaagtgtctgccggttatgtgggacaacccatcggcagttcggccgataatgattttcaatatacgctgaatataaaaggacgtctttctactcccgaagagttcggcgacatcatattgagagtggaagaccagggaaaagtgctccgtctgaaagatgttgcaaaaattgagttgggcagtgccgggtatggagttgtttcccgcttgaaagggcaacctacggctgctattgctgtttaccagttgccgggaagtaattcgctggatgtttctaaacacgtccgtgcccgtatggcggaactggctgaaacatttccggccggggtgaaatacaatgtgacgttggatactaccgatgtggtacacgactccattgatgaagtgatgaagacctttgtggaagcgattattctggtggtgctggttatcttttttttcctgcaaagctggcgggcggttcttatcccctgtcttactatccctgtgtcccttatcggaacattggcggtaatggctgctttaggcttttccatcaatacattgacactgttcggcttgatattggctatagccattgtagtggatgatgccatagtggtgactgaaaatgccacccgtattctggatgaagggaagctggacgcccgtgccgctaccgagcaggctatgggggagattaccggacctattgtcggagtggtgctggtactgcttgccgtatttattcctactacgctgattagcggtatttccgggcagctttataaacagtttgctttgaccatcgcggcttctacagtgataagtggtttcaactcattgaccttgactccggcagtctgcgctctgttgctccgtcccaccccgacgcataaagcgcgtttgttcctctggtttgacaagatgaatgactggatgcagcgggtttatgacgcttcggtaaaatggttgttggcacggccggttattgctatcggttcttatatcgtaatctcagtcattgctattctgatgtttgtaaaatggcccagcacctttattcctgaagaagatgacggatattttatgattgccattcagcttccggcagcttcttctttagagcgtacacagatggtgggtaagcagattgatgctattttgtcagagtatcccgaagtgaagacttatttgggcgtaaacggattcagtatcatgggaggtggtcagttgcctaatgcggctacctattttgtggtgctgaagaattggaaagagcgtgcaggtaaagagcataccgctcaagcggtggtcaatcgttttaacggacaggcatatgccatgatacaggaagcccaagtctttggtattattcctcctgctattccaggtatgggcaatacgggtggtttacaactcgaactggaggatcgtaagtctttgggtccggaagaactgcaaaaggcggttgaggctttattggctaattatcataatgagccggctgtcgcttccatgagcagtatgtatcaagcggatgtacctcaatattttttgaatatagaccgggataaagttcagttgatgggtttgcagttgaatcaggtcttttctacattagggtattacatggggcaggcttatgtaaatgattttgtggaattcggccgtatctaccaagtgaaattggaggctggcgaacaagcccaaaaagtgattgatgatgtgttaaaactgagtgtggtcaattcgaagggagagatggtgcctttcagcagttttacgcagatagaacaaaaactggggatggaccagataaaccggtataatatgtattcggctgcttccatcacttgtacgccggctgcgggcagtagttccggacaggcgatagaggctatggggagtttgattaaaaatcagctaggtggtgagtttggatatgaatggacctctgttgcctatcaggaaactcaggcaggtaatactactacaattattttaatcatggccttgttggtagcctatttggtactggcggcacagtatgaaagctggacaagtccggtggctgccgtgatggggcttccggttgctattttgggagcgatgttgggctgctgggtgatgggggttccggtgagtatttatacccagatcggtattattctgctgatagccttgtctgcgaagaatggtatcttgattgtggagttcgcccgtgattaccgtaaggctggcaatcctatccgtgaggcggcatacgaggcagggcatgtgcgcttgcgtcctatcctgatgacttcatttaccttcgtgctgggtgtgatgccgttgttgtttgccacaggagccggtgcaggcagccgtgtggcactgggtgcggcagtggtgttcggtatggctgtgaatacaatttttgctaccatttatattcctaactggtatgaagtgatgcagcatattcaggaaaaatggctgactaagaaaaaataattgtttggtttcaccacagattggtcagatttatacggacaactcgatttaaaaactgtatggatttgcgttatctgtggtgaatttgtgtatctttgcgacaaacacatggaaatatggatacaatcaacaacgatcttactaatttattgaaacagatgggtgtgcatcaggaaagcctgggcataacccagcgtattgtcattatagcagggattctgatcattgcttttgtggcagattatttttgtagaaaaatagtagttcctactataaagaaactgacggcaaggactcaggctacttgggatgattatttatttaatgatgctgtattagataatatgtgtcatcttattccacctattatattgtatgtattgcttccttttgcttttccgcatgaacctgtgactttgacattcattctgaagctatgctgggtgtatatcacggctgtagccatgaagttgatttgttcttttctgacttctctctataccatttcaagcgaacatgagaaactaaagaatcatcctctgaaaggggtatatcagatgataaaactgattgtgatttgtgtaggggtgatcattatagtcagtaccttgattgataaagatcctgtgaatattcttaccggattgggtgcttctgcagctatcttgatgttggttttcaaagatacgattatggggctggtagccggagtccagctttctgccaatgatatgctccgtccgggagattggattaccatgccgaaatacggagcggacggtacagtaatagaagtgactcttaccactgtaaaggtacgcaattgggataatactataactacagtcccaccttatgcattggtcagtgattcgtttcagaattggcgtggcatgagggaaagtggtggacgcagagtgaaacgttctattaatatagatatgaatacggtccgtttctgtacaccggaacaaatgaaaaaatttgaaaaacaagtctggatgtcaggctttgaaaagacaggaaaggaggaggtgaatctttatgtatttcgtcactatctggaatattatttgcgtcataatcctcgggtgaatacagaattgattttgatggtgcgtcaattacaacctacgccgcaaggattacccatagaactttatttcttctcagccaataaagactggattccatacgaacgtttgcaagcagaggtttttgaccatttgttggctgttcttcccgaatttggattaagggtattccaaattccttcaggattggatgtgttgtctctttcttctcattaattatttataatctcactagcggagaggtacaggaatcatcacatattaacatggattacatcaaatttattgattgtcaaaatgaataatccgtgttaatatgtgagaatgtacactattatacatgaagttccagtataaaccgagttccttttttataatcagtgtccaaagtcagtgtaccatttaatttataagcgataaggctgcaagtaggcaaccctagtccgtttccttgcgttaaatcgcgtatttctgcaaatggcttgaacagtttttcacgtgcttcaaccggaattcccgttcccgtatcagttagtatgaattgatgtgtatgggcgcttcgttttttgaattccagtgaaatcttaccacttttcgtatattctgccgcattgttcaataaatggtttaatatacgttccaattcttctgcatttgtcttaatatttacacgtggaacatttaccactgcttctactccggatttgaagtttattttcgctttttccataatactttcacacaatgtatttatgttcagttcctttagcggataatgttcttcacgtgtttcttccaatgaaatatacgtctggatagctgtcatcagttctttcagtgccttgatgttttcatgtaatattggggtggatattgtttcctttgttgcttcatctattgtattcagacttggttcaatttgggcgctgatattaccgataaatttagacttctgctcattgttttcattcgctatctgtaggctatgtttcaatttctttacttggcggatatgtttaaataacagggtagctaagaataataatccggcagccaatatggcggataacacacatagtgcaatgataataattagatttgtggtaatcttgtcttctttttcctgcaaagtcttttgactggtttcatatttttgttgcagtgtgtttagttcattggctgtttttactgcttttatggaatcttgccatgaagtataaagttttctcattgcaatagccaatggggcattattattctgttcggcatatcccaacatgtctttatagcattggtctattcctttttcgtctttaccggcagagcgcttttggaataaggtgttgtaacattccaagcttttgtctgtcataccgaaagtttgataataattggcttccgtcattagaagctcttcttgtaaagagtctgattttaattggtctgtataggaatgaagttgtttcaatagtatcttgcattgttctgtattttttagattcgtatacatacgcaggcgttctttacccaccatgaaacgtaatttgtattcgggtgattttttttcttgctcattataataaatcaatgcatccatttgtcggcaagtggcaaaggcttctttatattgcctgttttgagtaaagagcgtacttatccgtattccctcttctaccgctttatttatttgcttttgttcggcatactgagtgaattttgcccactttgtatttaactcttgaatattgacatctgccggtttggctgtagtttgtccttgccctgcagcacaacaaaaggcaagtgctaatgttagaagaatttttttcattattgaaacaggttttctgcaaatataacctttttttaagcaaaaagtttagggaagtgcaactttttttcagcttctagcgtctaaacagtaaaacaataacttttaagcaggacaggccatcttgtaaaaagaataaaatcataatatttaaaatgagaaaaatagtaatgatagccatactggtagtcagtatggtacaaggagtttttgcccaacaaataattataaagggcactgtgaaagacgcgacaagcaaaaaggcagcagaatatgttaatgtagttttacaaacagcagattcggtttttgttggagggactactacgaatggtaaaggcgatttcttgctgaataaggtttatgcaggcaattatttattggcactatcctgtgtggggtatcgtacgcaattcattgtattagacggaattaaacagaatataaatttaggggaaattttgttggaagatgatgctgtggctatggaaggtgtaacagttagtgcttccggacagatcagtcattcggatcgtaagttgatttttccttctgaacggcaaatgaaggtttcgacaaatggagtcaatctgttgcaacagatgatgcttccccgtattcagataaatcctatgaataatgagataggagtgttagggggaggagaacttcagcttcgtattaatggagcgaaagcagaagttgaagagattaaggcattacagccatcagacattattcgaatagagtatcatgacaatccaggtttacgttatggtaatgctgaggtagtgcttgattatattgtccgccgtccggaaacggggggaaactttggagtggatttgtctcaggggatgaatgccatgtggggagaatataatgtttttggaaaagtgaaccataagaagtcggagtttggcgtttcgtattacatgggacctcgcgatttctatggtatgtaccgggataatgaagaggaattccatttggcggacggaacgacattacatcgtatagaagaaggtgaaccggggcacggatctatgtttatgaataatttaagtatgaattataatttgcagcagaccgaaaattcattgttcagtgctacttttcgtttgagaagtaatagccagccgcattggaattatcaaggagtattgactaatgttgccgattctgatgataaggtggatatgatagaccgtactaaagaaagttggtctcgtccttcgttggatctttattatcaacagggattgaaaaataagcaacttttggtattcaatgtggtcggtacttataataaggaaaaatcacgccgtttgtatcaagaaagtttgcaggatgagttgttgactgatattaataataatgtattgggagataaatattctctgattggggaggctgtttatgagaagcaattttctaaaggaaattccttgagtttcggtttgcgccatactcagtcttttgccaataatgaataccgtaacggtcattattatgaaacggatatgaatcaaggggatacatatgtttatggtgaatatagaggaaaggtgaaaaaattggactacagattgggggtaggcgttactcgttcttattataaacaaagtggtgatgattcgtatgagaattatagttttaatccccgtttggtactgcattatgcattaccgggaaattcatttgttcgttggaaatccgatatcagtaatgcttcgccgtcattgggggatttaagtgctgtagaacagattgtggattcgttgcaaatcagacgaggcaatccgaacttgaaagcctatttgcgttatcacacagagttgacatacgaatggcagaaaggtatattttattctaatctttggggagcgtatgattatcagccgaatgccattatggacgagaagtatcaggacggtgacaagattgtacagacatgggacaatcaaaaggattggcagaaattatcggggcgtctgactttgcgtgtcggtcctattaaggatatgctacagttctcgtttaccggtggagtaaaccattatatgagtcatggtaatacatattctcatacttatacaaactggtattgtaatgctgaagcatcctttaattacaagcagttctctctttactggcagatgaatactaactggaataatttctggggggaaaccttgtcggggggagagaatattcaggtattgatgatgtattacacgcataagaatttgcgtgtggggctaggcgctttcaatccgtttacggataattataagcaacagactgagaactggaataaatatgcttcttataaaaaaacgaattatgtgaaggagagctcacaaatgtttttggcaagtgtttcttataatttctcgtttggccgtaagtttaagacaggtcaacggagggtgaataatagtgataacgattccggagtgatgagtaccggaaaataaacaagataatcatttgaatgagcttaagttcatggggcaagtaagttaagtaacttgactcacgaacataagttgcttggcttacgaagttaagttcataaatttaccggaataatagatatattacccttaacaaaatcatatatgaaaatgaaaaaaaacttgattgattatgaactcctgtgggagaaaattacggattacgcaaaggccaccggtagaacgactgctcgtcctgtacttctattatattatgtattgcgaagccccgaaactccttattcggataagatgttgattgtggcggcactttcgtatctggtattgccgatcgatttgatttcggctaagcggttaccaattatcggctggattgatgaagcggtatctttggtttatgcttataaaaaggtgtgccgctatgtgactcctgagattgaatcagaagtggataatatattggaacgctggttcccggaaggaaagtatgagttgatagaagaataaatattgtacttgtctttggggagtaaggatgggtaaatggagtattttaggaatgggcttcgtcgaatttcggcgtggcccttgctgattgtagacaaaggtaaattgtaactctccccaaggaacttcattttgtctgagaatatgtgaggtatgtaaaagtgttacaatatgttttgagtcttattaattccctataattcaattattaacatgacctaagttctcttagaacttagataaaaacgctcaaaaagagttgttttgctggatttggcaagcaaaaagtaaggcttaatagaataaaattatttattatccaacattttatctgcaatttctttgatatttaatatattttcatatctttgcagcaatatttaatataaagttctaagagaacttagcatttatgaacgttaaattaaaaagtttttttatgaaaaagagagttttgtttacgttggcttgtctattcctatggacaggtatggcaatggctcaagtatcccgaattactggagttgtagtttcggcagaagacaatgagccgattgtcggagcttcggttcttgtgaaaggtactacccttggaactattaccgatatgaatggccggtatagtataaacaatattccggtcaatgcaaaatctttggtaatatcgtttgtcggtatgaaaacacaagaattggctataaagggtggtgagcaaagagtagtgatgcaaagtgatacggaattgattgatgaggtcgttgtagtggcttatggtacacagaaaaaatcatcttttacaggagctgcttccacagtaggggccaaatccatagagaaacgtgctatcactaatgttacagctgcattggaaggaaatgcttccggagttcaggtgactgctgccaccggacaacctggtgaatcttcttctatccgtattcgtgggtttggctcagtcaatgcatccaatgctcctttatatgtagtggacggaactatatacaatggcagcataggtgatattaatcctgcggatattgagtctatgactatattgaaagatgcggcatctacttctttgtatggttcaagtgcgggtaatggtgttatcttgattactactaaaaaaggtaaagagtcaggtggaacaggagtaaacttgactattaaccaaggatggtcaaacagggcttataaagattataaaaaggtgggaatttatgattactatcctttacaatgggagatgttgaagaattcctatattacatctggtaaggatgctgcaacggcggcctcattggcaacatctaaaattggaagtacgttgaaatataatccttttgttggtgtcgcagatgatgccattgtcggaactgatggaaaactgaattcttctgctgatgcattgaagtggggggatgatttggattgggaagatgcagctttcaagaccggctatcgtcaggaatataatttgagttataatacaaaaacagaaaaaagtgatacttatgcttctgttggctatttaaatgatgatggttatatgatcaagactgactttgaacgttattctggtcgtttgaattataatgtgtatcctactaaatggttcaagactggtttgaatttgggagtaacgcgtacggtatccaattattcaacttcagattcgggaaattcgagttcatatagtaaccttacccgttttattcgtaccatggctcctatatatcccgttcataaacatgatttggaaaccggtgcttatttggatgctaatggtaaggcaactactgatccgggtgaatatatttatgattatgaaggaactcgcttgtcgaataatggacgtgatgcgatagctgaaacagagttcaatcaacgtgaactggtgcgtgttaatcagactggacatacttatctcactttgactccggttgaagggttgaaccttacagccaattactctatcaataatattgattatcgtcgtaaagtctatgaaaatccttatgtgggcgatggcactgccggaccgggtcgtttgaaccaaatgtctacccgaacgctgactcagaccttcaatcaattgataacttatagcaagtctatcggaaatcataactttgacgttcttttgggacatgaaaactattcttataagtatgagtatttatatggcatgaagacccaggaaacagtttcgggcatgtatgaatttggtaatttcgtaaatatcagttcacttagctcctatacggacacctataaaaaggaaggttactttggccgtatcaattatgattatgcgcataaatactacgcttcactttcttatcgccatgatggttcctcgcgttttgcaaaagagaaccgatgggggaatttctggtcgttcggagcaggctggagaattagtgaagaggcatttatgaaggatgtgaaatgggtgaataacttgaaattacgtgcttcttacggtgaaacaggtaatgataatatattggatagtgatggtgatcctgattattatccttatcagaccttatatggtttgggatataagaatggctcagaagctggagcctacttcacggtgatagccaatccctcattgaaatgggaaacacagatatctacggatattgctcttgaatttggcttgtttgaccgtttgacgggtactattgaatattttaagaaagattccaaggatttgttgtttgatgtttcccagcctgcttctgtcggagtaacatccattatacagaatatcggtaaggttactaattcaggagtggaaatagagttggattataatgcatttaaaaataaagattggagtgtatcagttggggccaatgctacttttgtgaagaataagatcaagaacctgccggctacaatgaaagaaaatggatatatcagtggctctaaaaagtggttggaaggaaagtccatttatgaattctggcttcgtcaatggcatggggtagaccctcagaccggtgatggtttatatgtggctgatgtaagtaaatataatcaagggaatatcggaacaggggatggaaacattacgcagagccagtttgacgagtataaaaaaacagtagtgactattgatggtaaggaattgaccaattcgtatacttatgctaaatacgacttcagcggttcttctattcctgatgtgtatggtgggtttaatgtcagagttagttataagaactttgatttggctgctgtattctcttaccagttgggcggtcagattctggatactaattatgctaccatgatgagtatgactgaatttggttatgcacaaagtccggatttgttaaaagcatggaaacaggcgggggatattactgaggttccccgtatagacaatagtgcggctcataccacgaatattggtcagtcttattcaactcgttggcttaccagctcggattatcttaatttaagatctgtcactattggctatcagctcccaaaaacttggttgagcaaagtgatgcttaagagtgcccgtttgaatctgactgcggaaaacttgttcatgttgaaagcccgtcagggattgaacccgatggccaactattccggtgtgacttataatgagtatatgccgtcccgtaatatcacgttagggcttaatgtttcattctaaaaataaaagaattatgagatcaattaaaaatataacattaggattagcgacagttggagtaatgtctctatctggttgtgccggtgattatctggataccattccgtctacctctgtttcagaaacgacaataaacacctcgttggacaatctttatatagcattgaacggaattcataaagagatggtttctcaggaaagcggatatcagtgtctgggcggtgaacccggttttatgatgtcacgtgatgcagaggctgatgatatgaattggcagacaaatacatggatgaaggcggcctatttaggatggcaatgcaatatgaatgaaacgaatggttataattataagttctggcagatttattatcaatggattctgaatgccaataaaattttggcgggtttggaggaagttgaaataactagccaggaattgtttgaccagataaagggagaagctttatgtatccgtgcttgggctcattttaatttggtccagctttatgcaaaacgttatgaagccggcaaggataatacacaggatggaattccttatcgtgaaaaagctgtggccgaagagcaggcacgtaattccgtagaagatgtttatgctaaaatcaataatgatttggatgaggcttgtatacttttgagtggaataaaagtaaatgatgtcaatcattatagcgagatggtggcatggggattgaaggcacgtgtagcattggccatgcaagattataataatgcggcggtttatgcagggaagtctatttctttagctgaagctggtggtcaccggttgatgactggcagtcagttgaattgtgggtttgccaatatcacgacggacactaaagaagcgatgtatgctgcaatgactcccgatgataagactgtttatttttattcttattacgcatatatgtcatggaactttaactccagtgccattcgtcagggagtgaagtgcataaatgtggatgcttatgaaacgatgtctgaaacagacttacggcgtgcgtggtgggatccgacaggggaagcatctgttccatcatcaagttatgcaaagaatgcttatcaaaaccgtaagtttactgcccgttctacagccgatgctgtaggtgatgtcgcatttatgcgtttggcagaaatgtatctcacccaggccgaagcattggttcgtgcaggaaaagatagtgaggcgcagactgtgtttactaaattccagataacccgcgatccctcttatgtttcaaaaggaaatatcggtgatgctttggcagaggaaattatgaatagtcgccgggtggaattgtggggtgaaggttttcgtttttatgatttgaaacgtttgcatttgtctattaagcgtggatcaaattttgatatagctttctgtacttttcttgaaaaggataaagatgcacaaggttgggtgtgggagatacctaaaattgaaactgactttaattcactttgtacgaagaactattgataattctctctaacacataaattttctcttaaaggaggtgggcagaatttttcttgaaagttttgtaccacctttttgcttgacataacctttgttttacaagaccgatagcttttctggttttctttttgtattactagggttgtctaatatcaattttgttgatgtttttgggtaatttagaagaaatggatttaatttctccttggtctatcgttataatccattgtcttgaataaagtaaagaacctgtaaacacgaaataagtgtaaacagattctttactattgtttaaaatgataaactattcaggtgaaaaagcttattcctcttcgtccagtaaaatgtccataatctgaactgctgctttggcaacagaggttccggggccgaagattgctacaacacctgccttgtataagaagtcatagtcttgagcggggataacaccaccggcgatgaccaaaatatcttcacgacctaatttctttaattcttcaataatctgcgggatcagtgtcttgtgtccggcagccaatgaagaaacacctactacatgaacgtcgttttccactgcgtcacgagcagcttcggcaggagtttggaacaacggtcccatatctacgtcgaaaccacagtcggcataacctgttgcaactacttttgcaccacggtcgtgtccgtcctgtcccatcttggcaatcatgatacgcggacggcggccttccttctttgcaaattcttcggtcagttcgcaagctcttgcgaagtctgtatcctttttactttctgatgagtacacgcctgatatagttctgattactgctttataacgtcctacaattgtttcacaagcatccgaaatctcgcccaaggtagcacggacatgagctgcctctacagccagttccagcaaattgcctttacctgtctttacacattcggtgatggctgccaaagctttgtctacttctgcttgattgcggccttctttcaaacgcttcagattttcaatttgttccaaacgtacagctgtattgtctacttcaaggatatcgataggatcctctttttccaaacgatatttgttagtgcctacaattgtctgggcaccggagtcgatacgggcctgagtacgtgccgcagcttcttcaatacgcattttgggtactccggtttcgatagctttcgccataccgcccaagctttcaatttcctgaatatgttcccaagccttgtgagccagttcgttagttaaagattctacatagtaagaaccaccccatgggtccacgttcttgcaaacatatgtttcttcctgaatataaatctgagtattacgtgcgatacgtgcagagaagtcggtgggcaatgcaattgcctcatccaatgcgttggtgtgcagtgactgggtgtgtcccaatgctgctgccatagcttcaatacaagtacgacctacattgttgaacggatcttgctccgtcaatgaccagcccgaagtctgggaatgggtacgcaatgccagtgatttcggattcttcgggttgaactgcttgacaattttagcccacagcatacgtgccgcacgcattttggcaatttccataaaatgattcatgccgatagcccagaagaatgacagacgcggagcgaatgcatcgatgtctatacctgcggctactccggcccgaagatattccaaaccgtcagccagtgtataagccaattcaatatctgctgtggcacctgcttcctgcatgtggtagcccgagatggagatggaattgaacttaggcattttttgtgaggtatattcaaatatgtcagagatgatcttcatggaaaaggcaggtggataaatataagtgttacgcaccataaactcttttaagatatcattctggatggttccggccatttcttccaatttggctccctgttccaaacctgcattgatatagaatgccatgatgggaagtacggcaccattcatggtcatggaaacagacatcttgttcaaaggaataccatcgaacaaaactttcatattttccaatgagcaaatagacacgcctgccttacctacgtcacctactacacgttcatggtcggggtcatagccgcggtgtgtcggaaggtcgaatgcgacagacaagcctttctggcctgatgccaaattacggcgatagaatgcattactttcttcggcagtggagaaacctgcgtattggcggatagtccaaggacggaaagtgtacatcatggagtacgggccgcgaagataaggaggaatacctgctacatagttcaagtgctccatgccttccaaatcttctttagtgtaaacaggcttcacattgatgtgttccggcgttttccagtcggcggtgatgccattttctttttgccatttcataccattctgaggttgaaatccggcatatatatctatatttttaaaattcggtttcattgttcttccttacttaattcctaacttagcgttgtattctttcaatgtgtccaatacgttgacacgtacatggataaagttttcgatgcctgcggctttcagctcttccatacaagcaggagcacctgcaacaatgaaaatagctcgtccgtccaatgccttgaatgcaggaatagcatattctgcatattcatcatcgctggaacagataactacgatgtctgcaccggctttcatagctgcttcgacaccggcctctactgtggggaagcccaaattgtcgattacttcgtaaccggcacaagccaagaagttgcatgagaattgggcacgtgcttgacgcatggccagattaccgatagtcagcataaatgctttcggacgtttgccggatttctctgtctgcaaacgaagtgcttcaaactggctggcagcacggtcgaagtttaatgtggcaaacggcttttcacagctgtcatgattacctccacaacaacatttggcttctacaggagccttttcgcctgctttttcattgaagttaggatattggttggtacccagtagaatttctttgcgttttgaaacggaatcgtggcgggccttgttgcttgcgttgatcgcttcctgtacttttcctgctttgactgcttccagcattcctccttcgtcttctactttcaagaataattcccatgcctgtgtggcaatagaaattgttaaattttcaataaagtaagaacccgcggcggggtcaactactttgttgaaatgacattcttcttttagcaataactgttggttacgggcgatacgttcagagaagtcgtccggagtttcgtaagtcttgtcaaacggggttacggtgatggagttgactcctgccaaggcggcactcatcgcttcggtttgagtgcggagcaggtttacatgtgcatcaaacaaagtcaggttgaaagtggatgtttcagcatgtgccaccattttgcaggcacagagacaagtgccgtcttccgctttgttcggacattcgggctggcggttgcattgaggatgatattcttttacgatgtccgcccataacatacgtgctgcgcggaacttggcaatttccagaaaatagttggaactgatgccgaaattgaattttattttcttggcagccagtgcggcaggaactcctgcttctaccagcttgctcagatattcgttaccccaggccaatgcatagcccagttcttgtgaaatataagatccggcattgttcagttctatcgcattgacacagatacaacggaatttaggtagcggagccagtacttctaccaattctttggcagtagtgatgaaattgctaaggtctttgccttttaccatcattttacccatagggtcatagttgacggagccttgcaacttggtcaggtcgtatcctttcttttggaagtaagcaaccaataattgggctaattccaccgtatgtccttggcaagtggagaagtttaactcaatgcattccgcacagatatcattcaataatgtttcgatatattcaggactgaggtctttcttctttacgtagaatcccaatgagtcaacacctttgttcaaaatatccagtgctttagcattagcctctttagggcattctactttgatttcctgacgcacgaaccaagtattgtcgtttttcttcgtgcctcttacataggggaattctccgggtagtccttcagttgttttcaaaccttccagatcttcctggcgataaaatggttttactttaaaaccttcgttggttctccaaaccaatttcttttcaaaatcagcgcctttcaagtcggctgtaatcttttccatccactgttccgtagaaacggctgggaagtccgaaaagagtttctctttactatctgccatagtttattcggtattaatatttaagaattatatcacatactttttcaatagtacgggcaaatatactaaaaccttttaaatagaatcctttttttagctattttcataaaggagaaagagaggtttctgtcattttgttaagtgacgaaaataaaagatgttcttattgcaaagtggatattgcaaaataaataggaatcatgaaataatagttttcaaattgttgggctgagtgaggggaattcattaattttgcggcaatttataaaaacatagtattatatcatggactggttacaaaatctattatttgatgaaaactcaatagcgcatatcgtgctgctttattcctttgtgattgcagtaggagtgttgctgggaaaaattaaatttttcggggtatcgttaggtgttacttttgttttgtttaccggtattgtctgcggacatttcggcttaacggggaatacacagatacttacatttttacaggatttcggactgatattgttcgtgttttgtatcggacttcaggtaggtccttcttttttctcttcctttaagaaaggagggattgctatgaatctagtggcaatggggattgtcgcattgaacattgctgtggcagtggctttgtattatggtttgaacggccggatagagctgcctatgatggtgggtattctttgtggtgccgtaacgaacacgccgggactgggtgctgccaacgaagcgttgagccagctgaattacagtggcccgcagatagcgatgggatatgcgtgcgcttatccgttgggagtgctgggtatcattggttctattattgctatccgctacatttgccggattaatttgaaaaaggaggaagaggatatcgctaaagaagaagctgcaaatcctcatctgactcctcgtatgatgcatctggaagtacataatgaggcgttggcaggaaaaacgttgcttcaggtcagagacttcatggggcgtgactttgtttgttcgcgtatattgcagaacggtcatgtcagtattcctaatcgtgatactgtcttccatcttggtgatcagttgtttgtggtttgtgcagaggacgatgcggaagccattattgcttttatcggtcctaaaattgaagtggattgggaaaagcaggatactccgatggtatcccgccgtattttgattacacaacctaaaatgaatggtaagcaattgggtgagtttcatttcagtagtatgtatggtgtgaatgtgacccgtgtcaaccgttcaggtatggatattttcgcttcacgtaacttgaccttgcaggtaggtgaccgtgtaatggtggtaggtcctcaggatgcggtggaacgtgttgccaatttgatgggtaactcattgaaacgtttggatcatcctaatatcgtgactatttttgtgggtattttcctgggtattttctttggtagtctgcctattgcgtttccaggtattcctactccggtaaaattgggtttggctggtggtccgttgattgtatctattttgataggtcgtttcggatataaattgaaattggtgacttataccactatgagtgccaatttgatgttgcgtgaaattggtattgctttgttccttgccagtgtggggataaaggctggtgcgaattttgtgaatacggttgtcgatggagatggtttgttgtatgtgggttgtggtttccttattacagttatacctttattaataatgggagcggttgcacgctggcattacaagatgaattatttcatgttgatggggcttattgcaggtagtaacacagatccccccgcattggcgtattctaatcagacagcaggtaataatgctccggcggtaggttattctactgtgtatccggtgtccatgttccttcgtattctgactgcccaattattgatattaatattggcaagctgatattggtaaaaagtataaaaacaataaagtataaaacttgtaggagggggtgtcaaaaaaatggtagcttgaatcatttttttgacgcaccctcttgctgattaaaagaataaatatgatttcagtagatggattgaccgttgagtttggcggtaccaccttgtttagtgacatatcttttcagataaatgagaaagaccgtattgccttgatggggaaaaatggtgcgggcaagtctaccttattaaagatcttggctggtgtgcggcaacctagtcgtggaaaggtgtcggctcctaaggattgtgtgatagcttatcttccccagcatctgatgacagaggatgggcgtactgtattcgaggaagcttctcaggcattcgcgcatcttcatgctatggaggcagaaatagaagccataaataaggaacttgaaacacgtaccgattatgaaagtgattcatatatggagttaatcgagaaggtttctgccatgagtgagaagttttattccattgatcttactcattttgaagaagatgtggaaaaggctttgctgggacttggttttatgcgtgaggacttcaatcgccctaccagtgatttcagcggtggctggcgtatgcgtattgagttagctaaattattgctccagaatccggatgtattattgttggatgagcccaccaatcatcttgatattgaatccatccagtggttggaggatttcttggtcaatagtgccaaagcggtaattgtcatcagccacgaccgtaaatttgtagataatatcacgacccgtaccattgaagtaacgatgggacgtatctatgattataaagtgaattactcccaatatctgatattgcgtaaagaacgtcgcgagcaacagatgaagcaatatgaggagcagcagaagatgatacaggaaaccaaggatttcatagaacggttcaaaggaacttatagcaaaactttgcaagtgcagagccgtgtgaagatgcttgagaaattagaattggttgaagtggacgaagaagatacctcagcattgcggttgaaattcccgccttctccgcgaagtggaaattacccggtcattatggacggggtaggaaagacctatggtgatcatgtggttttcaagaatgcctcattgaccatcgagagaggggataaagtggcttttgtgggcaagaacggtgaaggtaagtctactttggtaaaatgtatcatgcgtgagatagagcatgaagggactttgacgctgggacacaatgtgcagattggttattttgctcagaatcaagcctctttgttggacgagaacctcacggtctttcaaacgatagatgatgtggcgaaaggggagatccgtaataaaatacgagacttgctgggtgcatttatgtttggcggccccgaagcttccatgaagaaggtgaaagtgctcagtggtggagaacgtactcgtcttgccatgatcaaactattgttagaaccggtgaatctgttgattttagatgagcctaccaatcacttggatatgaaaaccaaagatatcctgaaacaagctttgatggattttgacggtacattgattgttgtatctcatgatcgtgactttttggacggattagtgacgaaagtgtatgaatttgggaataaaaaggtaaaagaacatctttgtggtatctatgagttcctggaaacaaagaaaatggaaagtttgcaggagttggaaaaataaattagctttgtatctgttaactttggattggatgtggagatgcaaacaatttctatagatataaataaagtacaaaaaggagacgagacggagtttcgtcttctttttaatcttttctatcctcgtctgatgtctgtagcttgccgttttgtgcctgaacatattgccgaagatattgtacaaagtgtctttgtcatgtattgggagcagaagtccgctttgatacccaatgccattcattctttcctttataaatgcacacagaataattgcctgaattatctgaagcaccaagctgttgtgctggggcatgaggaggaggtacgtctggcggaagaacgcatggcctttcagctggcaggatcggacgccaacgaattgtggaatgaggtggttgagcgtgatatccggaaattgttgaaagcttccatctctaaattacctcctaaatgtcgtcaggctttcgaattgtcttactttaaagagatgacttataaagagatagcggaggctatgcatatttcatcccgtacggtggaagaacatgtacagaaagccacaaaattcttgagagaggatttgaaggaggtattgttctgtctgttgtttttgcttcgttaataccttcatgcaggctttttctggagtctgtaaaaaataaaatgcaaaaaaagcatttttttttctttttaaccccgtagttccttctaggttaattgtcttaataatgaaagacaataaagaaagtaaatgaaggacgaaattttaattcgatatatcaataagcattgtactgcaaccgaagaaaaagagattttagagtggttgaaagagaaagataaccgtcagcgtttatttgagctggagcaaatctggggactgaaagctgaaatgcgtttttcggataaaggacgtatggatgaagcttatcggcaactgagcagacaacttggcttgagtgggcagatagagaaaagagagaaaccgatacagagatttaccgtcagggaatggtggaagtatgcggctgtgttggttgctgtttgtctttttgcgacaaacttgttctatatcacgaaagaggaaccggaagcatacaatacggtagtggttccgaaaggccaacgggtttctttattgctgagtgacgggacaacagtctggctgaacgctgagagccgtttttcttatccggctaagttctcggaaaaatatagaacggtcacattggaaggagagggctattttgaggtggcacataatcccaaatgtccgtttacggtgaaattgccgatgttgaatatcagggtgttgggtacaaaatttaatgcaaaagcctatttggatgaaccgagttggattactttgaaagaaggttcggtagaagtatcaaccttagatgacagaagtaaggaaagaatgtcgcccaatgaccaggtatattacaccgttagtgatggcttggtgttaataaggaattcggcgcaggcaaatgtggatagttggactactggtgacctgagattcgacaataagactttgaaagaaatggcaaaggttatagaacgtcggtatgatgtgaaaatcaggattatggatagttcgctggttgaagaatatttcacttgccattttaggaaagacttgaccatagcccaggcgatggaattgttgaaagaaaccagacgggtggattatagaattgaaaagaaaacggtatacctatataaaaaataacagtatgtgaaactttgaaaaacaacggatgcctatgaagtaaaacctttgcaaaaaatgaagggtcgaagacgcaccaccatctttcgacccggattaatgagtaaccttataatttattacaaactaatcaattacaaatgtatggataatattatgaaatgcacgccattgggtgagcaaaaatcactatggctacgaaaaacattgttaattatgaaattctttgttctttttctattattgggaactgtcccgtgttgggcaggcatcgcttattcacagaatgtgaagatgtctttggacatggaaaatactacggtgcatgacgtgattaatgctattgagaaaaaaggaaatttctattttacctataatctgaatcaagtcaatgtcaatagaaaagtatccattaaagtagaaaataaaacgattaaccaaattttagatcggttattttcaaaatcaggtatcgattataaaatagaaaatcgtcatattgtattatataagcaagcaactcccgaagtagaagctgtgaaacaacagaaatctataaacggtattgtagccgatgagcagggtgaacctatcattggtgccagtgtattggaaaaaggtactacaaacggtacgattactgatttggatggtcgttttactttatctatcggtaagggaactgaattgattgtttcttatgtaggttataccacaaagaccgtgaaaataggtaatcagtctactataaaaattgtattaatagaagataccaagacattggatgaggtggttgtaattggttatggtacacagaaaaagtctgatgtttcaggttcggtaacatcagtatcgggtgataaactgtctaagattcctactgcaaatgcagagatggcattgcaaggtatggctccgggtttgtcggtaaactttggcagtggtgctgccggttcttctgccactttgcaggtacgcggtgtgacttcttggaaagatgatgatggcgagaacagtgaaagtaacggtccactagtgattatcgatggtgttccgggtaatatgtcttatcttaatcctgaagatattaaatcgatttccgtattgaaagatgctgctactgccgctatctatggttcacgttcggcagctggtgttattttgattgaaacacatcgtggtacgatgaattcagctccgaagattactttttccggttattgggggttgagtgccatgccgaagcgtctggaagtttgtaattcagctgagtttattaaagtacgtaagatggcattaataaatgcaggtacggatgaaagccgctggcctaaatatatcagcgagtacgagagagacccgagtcagtttgctgatactgattggcagaaagagtattatcaacgtggttttacacaaaaatataacattggttatacggcaggtagtgctaattccaatgtgtctctttctgctttctatagtaagacggacggtgtgactattgctaccggagatgaaaagttcggtttccgtttaaactctgatgttacccgtggtaagtttaaaatgggtgaatctgtaagctatagccgttggtcggccgatttggaatccaattcgggtttctcttccatttatcaggtgacgaatatggagccgttagcgttcctttatgatgagaacaacgatggtggttatggtggtgccatctctggtatgggtatgtctgatgccggtaatcaggttgcttttaataaattgattgataatacaagctctaccgattatatcgcagcttccggctatttgcagtacgagccgattaaagggcttatcgtgaaattcaatgccagccgtaatatgtactttagcaaatctcgtctttttacacctacctatgagattggggcggccaaacgaaacacgatggctagtttatctgaatcacgttcgcagacaaccaacgatttgttggaattgactgctaattatgacaagaccattgctgaaatacacaatctttctcttttattgggactttctcaggaagaaaataagtatgaagaccttagtgcttccggttctgattttgagaataacagtatgagcttgatgggacatgctaaaagtaactattctgtaggtggtaccaagacccgcagtgccctccgttctctctttggccgtgtgaactacaactacatgatgcgttatatgattatggcttctttccgttatgatggctcttcacgttttgctaaaggtaacaagtgggggttcttcccttctgtatcattgggctggaacattgctaatgaaccattttgggaaaatttgaaagaaactgtttccatgtttaaactccgtttgagctacggtgctttgggtaatcagaacataggtctttatcgatatattcctactttgagctacaatacccatgcattgaactatccttttgatggtcgtgaaacttccatgggatatgccattacagcttttccatccagtaacatcaagtgggaaacgacggtgtataagaatatcggtgtagacattagtttatggaacaataaactggagctttctgcggaagcttatattaagaacaccagggatatgctttctagccgtaacatcagtttagctaccggctataattcttctatcttggtgaacgatggtaagttgcgcacaaccggttttgaaatgcaagccatttatcatggcaaagccggaggattgaagtatgatttggatttgaatttatctcattataaaagtgtgttgaaatctatggccaatcctgactatctctatgaatacggtgctttgcgtacttatgtaggtggtgaaatcggtgaattctgggtatatcaaactgccggaatcttccaaaatcaagcagaagtggacgaatggaacacagctcatggctataaggatcaaaacggcaactggcagcctctgcagcctgtggctaagccgggtgatatccgtttcatagatcagaatggagatggtatgcttgatacaaacgaccgcgtgaaagtgggtagtggtacaccgaaggtgtcattgggattcaacattaacttggcttataaagactttgatttggtagccaatttctacggtgactttggtgctaagcgttataactatactaaatatcagttggagcgtatggaccatgtgttcaactatggtaagaatgccttgaatgcttggacacctgaaaatcctgatactgatattccacgtgccgtgtctggtgaccctaataagaactctcgtacttccacccgttttgtggagaatggtgactatctgcgtctgaataacttgcagataggttataatctgccggttaaatattgtaagaaaatgggcttgagtaacctgcgtatttatgtaggcgctacccgtttgttcactattaccaactacaaaggatatgatccttcaaccggttcttcagtcggacagatgggatatgactatgcagccattcctttgagtcgtgactttatgatgggtcttaaattcggtttctaattaaatttaatacgaagattatgaaattcaaaaacatattattatatgcagctcttctgagcggaatgtctttttcctcttgcacagatttcttggatgaagactctaatcccaatgctttatcacctggtattttctggaaaagtgaaggggatattatgaaaggattgactagtgtatacggagcgttgcagccgaatgcatcttgggcgataccgtttgaacgctacatagtaatagacggatacagaagtgatgagattacccacagagatgatgtgacgagttggatgaatatttcatcattcaatgtggaacccactaactccgtagtcaagacggagtggactaatttgtataaaggtattaattatgccaatcaatgtttgaccaacattcccactgtacctggtgactcggaatcactcaatgccttgaagaagcagtctatagccgaagcccgttttttgcgtgcttacttttattatcgtttgtatgtgaattttggcgagagagttcctatttataaggaggcattggcaggtacggatgaagagttctatccgccacaagccaatccgggagaactggtaagtctgattgagactgaactgaaagaagtacagagcgaccttcccgaaagttatgaggaaagtgaaaaaggacgtgtcacgcgttatacggcagcagcccttttgggtaagttctatatgttccgcaaagaattgggtaaagccgaagttgagttcaagaaaatcattgataaagaaggaagtctttttggcttgatggagaattgggctgataattttgacggtatgcacaagaacaataaagagtctctttttgagattcagtttaccggagaccgttcaggcggacagtatgaatataacttgtttactgttcatttgggacctatggctgggctggatgcatatgaagaagcttatcctacggattggatgtgtcagacgttattggctgataagactatagacggtaagtctagcgaccgtgcacttcatacgcttatttttgacgatcccgagtgtcgtcccttttattataagaatggaaaatcctttaaggattaccacaaagaaggagaaatcttctggcacaaatatgttacttataccgagggtatgagtgattattgggactatagtttctttaatgtttccgttatccgttatgccgatgtattgttgctttatgcagaatgtctaaatgacaagggtgaaacaacagaggccattaacataataaataaggttcgtgcacgtgtcaatgtaccggcattgccgcttaccatgagtaaagccgaagtcttgaaacatctgcaagacaaagaacgtccttgcgagctggcattggaaggttcgcgctggtatgacttggttcgctggggtattgtagaagaaacgctgaaagctcacaataaaccgtttgttgagaattatgtagataccaagcaccagttgtttcctattcctcatagtgaatttctgttgaatcccgattgggagcagaatccgaactatagcaagtaatcttgtttgtataattttggaagaaccgtttatgaaacatttatttcctatatatggaatgtgtagcattctttggctgggggcatgtaccccggtcgctacacagccggaaaagtccctgtttacgacacaggaagattttcccaatttgttgaatgtgaaaaatgtaccggaacaacctgtagatggggatctcaatttgttctctgatctgggtgcatggagtggctatgcattgccagtaaaccaaagcagggcatttgcgggtgccttcatcgggcctatgacgatgcatggaagaggatggattgcccaaacgttggcacagcctacgttggtggttaatggtgaaaagtacgatttggtccgtaatatgcagacagccaagtatctacctggaaagttggtacaacattttaaagatgcgcggttggaattcactactgagttgtgttttgccacttcacgcactgcttttgtacgttctgttattacaaatcttagtgacacacctttgaatgtgtcgctgacttggagtggcggtgtttttgaagagaatactactgccactaaggtggataagggcgttcggttccattatccgttctacggtcgccgttggggaaccaatcgccagattatcacactgcgtaacgaaccgccggtagacgaggtgacggctaccgtgcttttccatacagccgatgaagtgatgactgtggggaacgacagtttgcaagttgttgagaagagtgactatttgctgcaatccggcaaaagttatacttcggaatacagccagacactgaccttgaaaggcgaagaggcagataaggagtatgttgcaataaaatccataccttttgatcaatgttttgccgagaatgcgcagcgttggaatcaggggcttcaacggatactgtctgccgacagtccttatatgaaagaaaacgcttacaggaacattgctgtgaaagcattgatgacgttgaactccaattggcgtactcctgccggtgatatcttccatggttgtagtttcccttcctatacaggattcatcggtggatgttggtcgtgggatgcttggcaaattgcatcgggtaatgtgtactataatcccgaaggggccaagagtgaaatgctttctttgttcgattatcaggcagagaatggtatggttcctgattttatcggttataataaggcacgtaacaattggcgcgactccaaacctcctgtagcatcatggggagccatgaatgtctataaggttacaggagacaaagcgttcttggacgaaatatttgataaattgtataagttccatcaatggtggtatgctgagcgtgaccacgatcacaatggcatttgcgaatatggttctactgatggtacactgattgcggcggcttgggagagcggcatggataacggtgtgcgttttgatgacacccggatgctaaagaatgagatggagaaagcttggtcgatggatcaggagaatatttgtttgaattccttcctttatgtagataaactgacactttcggaaatggcttctatcttgggaaagcaggagctttctgaacagttggctaaggaggctgaggtaatcaagctgtatgtacagactaaaatgtatgacagcgagagtggtttcttttatgatattcgtttgaatgaccgtacacctgtcaaggtgatgggggctgaggggtggttgcctttgtgggcaggtattgctaccccggaacaagccgagagtgtgaagaacatcatgatggatgaaaaacatttcaactcttacctgccgctaggtactcttgatgtaagtcatcctgcattgcgtcctactttcggttattggcgtggtccggtttggtttaaccaggtatattttggtataaccggattgaagcgctacggatatgtggaggaagccgacttgctgactcgcaagttcatggcacatgctcaaggactgatgaccgacggaccgattcatgaaaactacaatccactgacaggtgaagtgttgaatgcacccaactttggttggtcttctgctttgattttgcgattgttgttggatcaatgatagtggaagtaaaaatcagtatgcggatactccgaatttattaaaagatatatttatgatgaaaattcgttctatattgacagggattgccatatctttgtcgttggcaggtatggcacaatcccaatatgacggtgctccggtaaacaggagcgctaacgaaacgagcacagacaatgtagaagtgcgtaaaaacaaatacccccgttcggataatgattgggaaaattttaatgtgcttcatatcaatcgtctgccttcggcggctaattttatgggataccccactaaagaattggcattgcagggtgataaatcacaatctccttacttccaatccttgaacggaacatggaaatttcattttgtaccccgttcggatgaacgaccgatggacttcttccaaaaaggatatgatgtttcaggttgggatgatattaaagttccttccaattgggaacttcaagggttcggctatcctttttatgtaggcagtgggtatggtataaagaagaatccaccattgattgcagtggaaaacagcccggttggctcttatagacgtacttttactattcctgctcattggaataaacgccagattattctttatttcggaggagtggcttctgctttttatgtgtgggtgaatggtgaaaaagtaggttactctcaggattccaaaacaccttcggagtttgatattacgccgtatgtaaaacaaggggagaatgaaatagccgtacaggttttcaagttcagtgacggatactatctggaagatcaggactactggcgttttgccggcatacagcgtgatgtctatgtgtatgcccggtctgaaactcatgtgcgcgactatgaagtggtgaccgatcttgacggggaatacaagaatgctgactttcatctttttgtagagttgggcaaagcaggagaaggtaaaataaaaggggctgaagtggaagtaagcctgttggacaaagcaggcaaaagtatctacaatgagcgtaagcgttggaatgctgccggtcgggaacttcattttaaaaaggaagtgagagaacctttgttatggagtgcggagaaaccgaatctgtatagattgctgattgctttgcgtgtaaatggcaaaccggaacaatacatttcccaatacataggtttccgcaaatccgaaatcaaacatgctcaactgctgataaatggcaagccggtctatataaaaggagtaaaccgacacgaacacgatccttataacggtcatgtggtagatgaggcatccatgctgcgtgatattcaattgatgaaagagaataatatcaacagtgtacgaacctctcattatcccaacgatccccgctggtatgaattatgtgatatttatggtatgtatgtggttgatgaggccaatatcgagagccatggcatgggatataagcccgatcaatgcctagctaaccagcccgaatgggagaaagctttcatagaccgcacggaacgtatgttcgagcgtgacaaaaaccatccttgtgtcattatctggtcattgggtaatgaaaccggtgagggatgtaacttcgcggctacctataaatgggtacatgccaatgaccgttcacagcgtcccgtgcattcggaagacggaataaagggaccttataccgatattttctgtccaatgtataaaaagatagatgtattgatcaatcattctctctatcttccgaccaaaccgctgattctatgtgaatatgcccatgctatgggcaacagtgaaggaaatcttcaggattattgggatgtgatagagaaatatccctctttacagggcggacatatctgggactgggtagatcagggcttgtatgcaaagacaccggatggaaaattctattgggcatacggaggtgacctggctccgaaaggtactccaagttctgccaatttctgtatgaacggtctgattgccgccgaccgtaccttgaagccgcatatccatgaagtgaaaaaagtatatcaaaatatagcattctctttattggattatcatgagggatgggtagagttacgtaacaagtacttctttacggatttaagtgatttcaattttacttggaagctggaggggaatggtgaacttctggctaccggaactattgataatgtatccctggctcctcagcagacgggtaagttcaagacttcttttccagccatacaggtaaaacccggtgtggagtatttcttgaatttctatgccagtttgaaaaatgaggatggtctgctgaaagccggaacaaaactggctgatgcccaggtgagtcttccattttatcagccgtttgttgctgaggttcagtcttcaccggtgatagcagatgatgcggcttcgttgttgacacttacagccggtaatctgagcgtaggttttgataaggaaaccggtgccttgacttcttataaagagggaagtacggaactgataaaagaagctttacgtcctaatttctggcgtcctgtgacggataatgatatgggaaatggcatgaataaaaccttgcgtccgtggcgtgatgcggggcgtcaggcaaaactgttgtccatgaaacaaaaggcgttgggtaaagaagcttatgaggttgtttctcattataagttgcctgtaggagagtctgattttatcgttgcctatcatttttcgggaaaagggtatttggatgtgaactgtactttcattccgggtaacgatacattgcctttattgccccggatgggggttagtattacactgaacaagcagtttagtcagatggaatggctgggacgtggtcctcatgagaattatatagaccggaatacttcttcttatgtaggtctgtacaagggaagtgtggccgatcagtatttcccgtatgaccgtccgcaggaaaacggtaataagactgaagtccgttggatgagcctgacagataccgccggacagggattgatggttgtcggacagccttatgtcagcaccagtgcttatctgttccctacagaagatttagatgagccgggccttcgtaaatcgcagcgtcatttatccgatatccagttcaaggatatggtgacatggaacattgacctgaaacagatgggagtgggtggtgataccagttggggggcttatcctcatcagccttatttgattccggctgaacgtatgtcgttctccttccgtttctgtcctgcaaagcagcatggagtatcaggaaaccggcaatatttgaattttaagtaacataggttcgttcaaaaagaaagagggctgataattattgtttacttatttgcggtagcccttttgtgaataatttaaggtcagaagggggatggttcagtgagtgaagtatctctcttaaaaaagcagcttggatagtgaattctatccaagctgtctttttattttttatatttgtcataccggttaatatcccggattctgatattcattagcgttatcaatcaacaataattcggctgtgggaatggggcgcaaatagtgaatgttcttatcgaattttgtgatttgcggattagcttttgtgatacggctttcgaaagcacggaatctcttcaaggtcatccagcggttccattcaccaatcatttcgcgtgcatactcgtccagcaagaaatcctgggtaacttccgaagctgtgatatccatactatggtcatgtcctttacaggcacggttccgaagtgtgttcagtctttcggcagcactttggttgttgcctaatctccagtcaatttcggctgatatcaggtaggtttctcctaaacggtagacaatacagtctgctgaggaataaggtttggaggcatttgaaccggcatataggctaggacaatctgctttcttcagacttgggaaaaacttcagaggactttttgtgtcggcatagttgtcttccaagttgaaaatggcatagcggcaagcgtttctttcggcttgtgtataggtcttacgagataaatagacagccgtatctcctaaagtgatatcataggcagaattaccgaccctgctggtggatagaccgtatctttgtgcatcggcctcgttccacgtatatccgttcttggtactgttcgtagcgttattcacataataagtgtctttgaagaaggctttatagcggccgtctttctctccatataaatcaagcatatacttgctgggttccatatagcagttaccttttgccagtttgggaacttcgtatccgttgatgttcgtagcgtaactgggtgtcatgcccgaaagatagatgcctgaggtattgttattgtatgcttcggagtgtttccatacacggttgaaatagtttccacgaggattataagccgtaatggtagagtggcagacaatgaaaagtgcttcttcgttgtttttattgttgttctcatcaaaaacagcttctacatcatcataaagcttgactcccaacgaaccggcgttctgaatcaggtaatctgccgccgcctttgctttttccaaataggttttgctttcgctgtccgtcagggcggtggtattacccagaccgtctgtataggtggagaaagtgaggcaggctttggcatataaatgataagcggctgcacgtgtcacgtgtccttttacttcctgtgtgataggaagatttttcatggcgaattccagatcttccagaattactttataaaaatcattaaccgaactgcaaggaagaacggaaataggactgttcataggctccaatggcaggtatttgcctccccattgctctacaatattatataaggcatgggcacggataaatcttgcttcgctgaccaactcgttgattcttgtttcgcttagcccttccactttgtcggcataatggacagctgcattacatgcactcaatataccatagaaacccgcatatccttcattcaacataccgttggaagcaccgtaatcttcataacggagtagtttgctccagttaccgttggtaccatcgggattcgtatcttgccaaatgtctgttccaccttctgcaaccattagataggtgtcttctgcctgaccataaactatgcggaccaggtcaaagtaacagtcgttcactttcttttcatagcctgccggggtagaccattcttgttctgtggagatgccggagggattaaattcatccaggctgcaaccgtaggcagacaacatcatgattacggctgatatagagagtaatttatgttttttcatctgtataagtttttagaatgagatattaacgccaaatacatattgtttagacaacggtgcgtcgtcatcatttcctcccttttcggggtcgtagtttttcaaatagtcacattttgtaaaaataaacggattgtttgcagtaaagtatacacgcattctgtcaatttttacagcattcaaccatttcttggggaatgtgtagcccagtgaaatggtttttactttcagataagaaccgtcaaaatagttagcccattgttgatacgggtcctgtccgtttgtaatacttgcatccggacgaggatagcgggcactttgattttcaggagtccagtagtcacatacggtaggtgaaggcgtcagaccgtctgtacgataccatccggtcagaccgtaagggattgtccagtcccaccgggcaatcaacaaaatgctcaggtcgaaattcttataattaaaattattaagtaaactgcccgaccatttcggtgtggcgcttcctagaacataatagtcatccgcattcagcttgtaatcgggagtaccattttctgcaatatgaacttgtccgggtttctgactgtatttggctgcttcttctgcttcggctgtaccccatattccggcatatttgtatccgtaataagtcttgattgcctcaccgggaatcaggtagtagtctccgaactgaagcgggccttcgctggttgtttttatcacttcttctttgttggttgagaatgccagtgtggtgctccattggaattcaggtccgacaaagttacggctggtaatgcttaattccacacctgtattgcgtgtttcgcctacattagaccatattttgaaaggagaggagccgtaacctcccgttgcatagggcaggtttttctcgaataaaatatctttggtgtctgtccgataccagtcgaacgccacgttcagtctgtcactgaataatcccaagtcgaatcccaaatctgtcatataagatttttcccatcccagactcttgttggcgatggattgggaataaccgctataagggactcctacatcttgaaatccgataatgcctgtgcggctgtaatctaatgtggcgtattctgaagcaccggcattaccggtgacaccgtaactggcgcgtaatttcagattggaaacagcttttacattctgcatgaagggttcatcactgatgcgccaggcaatagctcctgcggggaacatatcccacttgtttccatctgccaagatggatgaaccgtcccagcggctgcttaatgtcaataggtaacgtcctttatagctatagttgatacgggcgacataggacattttttggctacctacataagaagaagaaactgtgggtgtaccggttgcagcacctaaattatggtatagataagaatccgtatcaaatttgttggcagtggcggtcgctttttctttttggtcttttgaccattcagtgactccggttattgtgaaatcgtgatcctcttttattttgaagttatatgtcaggatattctgccatttataattataagtgaaggtgttggggatagtggcttgcactagcccgctttccagtccctgatatgattttgtgccggtatacttactttctttcatattccggaaatatccgccaagcagactcttgaatgaaagtccctttaacggggtcaattctacataaatctgtggggctacgctcaatgtctttacattatttacatattggtcttctcccatatcggccagcggattcatgttgccgtctcccaacgggtagtctaccagattgccgtcttcatcataaggagtacccaatggcggcatacagagaatacggttccatatacggctgtaacgcttgtcattttcagaatacatggcatataggtttagtccgtattttaccatttcattggctttaaaatctattttggcacgtgccgagtagcgttccagttcgtctcctttcaataatccttccaaattgtaatatcctaaagaaaaataagaggtgacccggtcattagaataagatgtgcttagattgtagctattggtgataccggtttgtgaagctaaatcaaaccagtccacccattgattgttgtctatatatttttgcatatagctgggaaaaagattcccgtcatcggccgggctgttccaggcacctaccgttctttgtgcttctctgcggaaattaatgtaatcctctccacgatttacttcggggaagctggagatgacattccaaccatagtaggcatccagatcaatggagaatttatcttttttaggagttttggtggtgatgatgataactccatttgctccggcagcaccataaacagctgtagaggaggcatctttcagtacttcaatagaagcgatatcattcggattcaattcatcgtaagagccttccattccgtcaatgatgaataacgggctattgtcaccattgatggagcgtgtgccacgtagggtcatgttcactccggaaccggcttctccgctactgcgagtgatatccaaacctgccacctgtccttgaatagcttctagtacattgctggttggcattcggacaatatcctcactttttacggaagcaacagctccagtcaaatctcttttttttacagtaccgtatcctatcaccaccacttcatccaatgtctgggtatcaggctgcattttgatattcaattgtgtgtttttgccaatggttatttcctgggttttatatcctatataggatatttcgagaacattttttccggcaggaacttccagtgcataattcccgtcaaaatccgtgatggttcctatggtgcttgcacctttgattatgacggataccccgattaaaggttcattgttctcatcaataatttgacctttgatggtacgtccttgcaggatcgattgaaccgattcatttttcactatgttacttgactttgcatgcgaataggcaaccggtatgcataggactattgacaatcctaaaataaggggactacgcataaggctgctttcccggttttgttttggatttttcttcatgtttttcatttttgcttctttattaattcactatttgtttttaaaggttgattgttatatcaagttgttgaatcagtttggtttcaatcgtaaacttattatgttagattaatcttttgttttctttcttttttttcatgtttctgccttttaatactttggagatttgtttgtgtttttttgttttatttctttattcttgctattttatgattttatatttataaatattaaaatgatttctttattttatttttagtgcactgtttgtgttataattatcttgtaggtgcaaaaatatacgaaagtaatcgaagataaaagtgaatatgctatgttgttgaacatatctatatcaaattctattttattgttttattatagctgaaatctggtgttggaaatattaagataaaaaagtccccggataagaacgcctttcttatccggggacttttttaaatattataagatgtattctttatcggtttttatacattctttcataatacttttggtaatcgccacttgttacattttccacccatgcttgattttccagataccattggattgtttttacaataccggtttcgaattttgtttcaggataccatcctaattcattagtgattttggtaggatcgatagcgtaacgttggtcatgtcccaaacggtctttgacaaaggtgattaatgattcgttaatccagtcgatagagatctcacctttatcgttcaactcttttttcttcaagattttgcgatattcgggagtttccgtcatcatccggtgaatagtggctatggtaagttttactatctctatgttttctttctcattgtgtccgcctacattatatacttccccttcgcggcccttgcgcagaaccaaatcgatggctttgcaatggtcttctacatataaccagtcgcgtacattctttccgtcaccatatacgggaagtttctttccttccaaaatgtttttaatgatcagcggaatcagtttttcgggaaaatggtacggaccgtaattattggaacagcgggtaatggttaccggcattttgtaagtatcacgataagccatgacaatcatatcagcgcttgtcttggaggcactatatgggctgtgcggacataaaggagttgtttcagtaaagaaaccttctgctcccaggctgccgtatacctcatctgtagatacctggtggtaacgtacatctttacgccaggtaggataaccattctcatcttttcccgtcacccaggcacggcgggccgcatccagcaggttttgagttcccaaaatattagtttgcagaaacaattgtgggttttcaatactgcggtctacatggctttctgctgcaaaattcacgatgtagtcaaacttgtattctgcgaatagttggtctgccaaatcacggtcgcatatatctccttttacgaagaaacaacgttcattatcaatgtctgatgcaatagttcccagattgccggcataagtcaaggcatccagtaccaccaccctgatgtcgtcatgtttggccaggatgtattttaaatagttggctccgataaatccggcagctcctgtaacgagataagtcttcatattgtttttgatattagtgcgtgcaaagttcggaaagattttttaatcttacaacttatccgccagttctattacttctaaatctttaaattctccattatcgatacaaaaacgtaccaatgttctcactttatgaaatccggaaatacctgctgctcccgggttgatgtgtaacatatccagtgtcttgtcatatttcacctttaatatatgcgaatgtccgctgataaaaagctggggaggtttcaccagcaggctgccgcggatggaaggatcatagttgcccggatatccgcctatatgctttatcaacacctcggcaccatctacggtgaagcggttggtttgaggataaagtctgcgtatgtcctgcccgtcaatatttccatatacagcccggaaggggcggaaagcggacagtttccgggcgacttccaccgagccgatgtctccggcgtgccatatttcatcacaattctcaaagtatttcaagtatttgtcatcccaaaatgcatgagtatccgataataatccgattcttgtcatagtttttttgtttattatcgacaaaggtactatatttggaacaaatctaagcataatatggagagcaaatatcattatttcaagcgtgatatcagttggttgtctttcaactatcgcgtgttgttggaggcggatgacgactcccttccgttgtatgaacggattaactttatctctatatattcttctaatctggaggaattctacaagattcgtgtagcggaacataaagccatcgcttccggtggccaaagtgatgatatgacacaggaagaagccagacacctgatacatcagataaccgaagctgtcaatagccagatggaagaccgtatccgcatttatgagcataagattgttccggctttgcgcaggcatcatattattttttatcaaagtaaacaggaggtagagccttttcatcaggagtttatcagtaatttctttaaggaagaaatttttccctatcttcaacctgttccggtatgcaagaatcgaatcaagacttttttacgtgacaaccgtttgtatctgtcggtacgcgtgacgcgcaaagacacgggggaaaaggaatactatattatcaaattgccttatagcaaagttccccgtttcatagaacttccccgacagggagaaaacttttacctgatgtatatggaagatattataaaggcgaatatcaaccgtatgtttccgggctatgatttggattgcagttattgttgcaagatatctcgtgacgccgatattttcgtggatgatgcaaccagttccgaagttatggtggaacagttgcgtaaaaaggtgaaaaagcgtaaaataggtgctgtatgccgttttgtctatgaccgcaagatgcctgcggattatctggagtttctggtcgatgcatttggcatcaatcgtgatgatttggttccgggagacaaacacttgaacttggaggatttggctcatctgcctaatcccagtaaggaactttgtacccaattgaaacctcgtcccatgacattgaattgtttggatgagaaagaatccatattccgttatgtgagcaagaaggatttgatgttgcatttcccttatcattcttttgaacatttcatccatttcctgtatgaggccgttcatgacccgtcctgtaaggagatcatgattacccaatatagggtggcggaaaactcggttgttatcaatacgctgattgctgctgcgcagaatggtaaaaaagtaactgtttttgtagaacttaaggcccgttttgacgaagaaaacaatttggctaccgccgagatgatgaagcgggcggggatacatattattttcagtataccgggattgaaagtgcatgccaaggtggcgcttgtactgcggtataacaaagagggaaaacagactcgcagctatgcttatatcagtaccggaaatttcaatgagaagactgcccggatatatgctgattccggtttgttcacttccaacgagattattgtgaatgatctgtatactttattccgggtattacagaaagaagtgactgaacccaaattcaagcgtttgttggtagcccgttttaatctgctgccggaactgagaagacgtatcggatatgagataaatatggcaaaggcgggaaaagaagcgcggattatcttaaaaatgaatgcgctgcaagatcctgccatgatagatgaattatataaggctagtgaggcaggagtgaaaatagacttgatagtacgtggtatctgctgcttgattcccaatcagccttatagcagaaatatccgtatcactcgcattgtggacagctttttggaacatgcccgggtgtggtatttccaccatggaggaaaaccgcttctgttcatgggttcgccggattggatgaggcgcaacctgtaccggcgtatagaggccgttacccccattcttgacgaagatctgaaacaacaactgatagatatgctggctattcagttaaaagataacagaaaagccggttgggtggatgaaaatctgaataatgtgttgaaaaggaatccggaagaagaaccggtacgggcgcaatatgctttttatgaatacttgaagaggaagaataaatgaagaatatgaaataacatattttatcttatttgaaatgattatccgcaatcataccaccggatgataaatggaaatttataaaacggggggatggaatgcgaactacacggacgaagcggacaaaaacggacttaaaatttaaatttgtacttgcaaacccaatgacaggtaaagtaaaaaaatccgtgttccatccgtcatcccattctataaacaaatattttgtggtatgattgaggattatcatttcatatattcccaatggaatggacttttacatatttgtctgcccgaaccaccgtccacgactccggaagtaatgcaccgtaagttcgggctgaaaaatccttcagatgtttcagccactccgcaaaccccttgttgacgggcgttccgactgaaggattcgatcatttaattgtttcagcccgcttgcggatgtttcagcctgaaaaacgggcgtccgttccagcaatttgaacgcacacttccaaaaaacaaaagtacggtttcaaaaagccgcgttttttcctgtcggagggtccggaatcctgatacaagttctgccggatcttgcaacaagtttcgcaaattcttgcaacaagttccgattcacgccctcactattccggtagaagtggttcctgccagaacaccagcccacgcgctgaaagaacttgttcttttcgaaaaacataagttccattaaaaaaaagataaggatgtctttagcaaaagaaaaggacctttttaaaaaacgaacttatcttttttacctgcctgcaagaccggcacttccccacttgccatcgaatgttcctggagaacgaccaggcattttctccaagctcttacttctttttgtgccgggaaagttgtcttttttcgtgtccgacctcggataatgataggtcttgaaactgtcttgagagttttcgagatctcataacaccttacttttaccggctgaaacatctgcaagcgggctgaaacaattaaaaggccgaatccttcagccggaacgcccgtcagcaaagggtttgcggagtggctgtaacatctgaaggatttttcagcccaatcccaaggaggatatagcggatagtttagttttgacacatccggttttaacaggtctgtttgtaaaagatatgtaagatgcggcgatgcatgatacataatgattatccgccatcataccaccggatgataaatgggaattgatggatggaacgcggatttatttcgttctataaattaaaattggaacacaaatgatacaaattaataacagtacagcatggatataaacctgccggaggttagatttgtgtcatttgcgttccggtttaaccgataaataattgatattgttatgaaaaaattatatataactttctgcctcttactggtttctctttgcatacatgcacagatgattagtggaataatagtggatgaaaaaaacagccgctagagtttgccaatatagtgttgttttctttgcctgattttacttttttacaaggtactatcagtgatcaaaccggagcttttaatataaaatcaaatgaaacaaaaggagtattaccaatttcttcagttggctattccactattctcctaccttgcactagttcaaatatgggaacaatacaactatattcagatgcgcaactattatactctcgtccatattatgctcagttgcgaagtaatgtaatgtatattaatcggtatacatatgagggtggtaatccttttttattaccttctttatctcataatataactttaggaacaacttataaatgggtatacttatcagccggatatcaatatgttaaagatgcgattatttcttttagtggagcttattcagaagatgatcctacgattgctttaattaatatgattaatgcaccagactatgataagatttttgcctcgctggttttatcacctactatggggctttggtctccacagaacaaaagaatcgtatgtaataaaaaacttagtttgacggctaaggggttcaatctgcccctatggaataattggacttggcttactccattcatttccgtcttagctgtgttaccatttccctgaaccagggataatttagccagatatattcataccagcggttcagtcttcttttccatttcctactccacggatacaactcccaccattttagttgaaaatccgttttctgcataaattcgtgggtgggaaacagagtaagagttattcctcttatccataatgttttcatttggttttcccaatattgcatagggccgaatcccggctcccaaataatgaagcggccttcatgaatgccataacaaaccacatatcccggtacttcgaaatcattgatggcaaaaagtatggcaggaaattttctggtggacaattgttccatgttttgcaagcagatttccgcttccattcctgcacgtatagctgcctgtttcatacccatcaacgtatattttccatctactttacaccattcggctagtgtgcgtgcatcttgttgaccgccatagtatttcatgacagtgagcagacaggccacttccatgggacattcgtcactggaacggacaaatgatttttttattctgtcaagttcgtcttcagtcataacttaatttatttttcatggcaggagcaaaacagcaacgcggatcgggaaaatcccaacaatcctttccataagcttttatgatatcactccagcaacggttctgataactgaaacagtcttcaaaaagacggcattccctgcatggactctctttgttgatatcctgacgtgacaaggaacaaaggtgcaaggcttgaggggaatgccagacttctttcagactttgtgtggttacattccctatgataaattgtggatgccagtaaagttgctcgcatacagtcactttaccatcaggcaatataaacatatgagtggtcaatgcagagcattcgcttcctttgaaacaccggcttccaccccaggtatcttgatagtttttatcggttacttctttccctaaaatcacgggaaaggaaacctgtgtgagaagagggcgtatttggttgaatacctttgtaatttgcgctttagtaggtttcaaatgcgaaaatacattatactctttgtatatggaattactggcggggataatacgccagtcgcgtatatgcttcagatgagataattcatgcagtaattctgccaagacattcatctggcaattgtagttggtcagcacagatgaaatctgataattcagtccgctgtcatccagtaattgcaggccgtgaagcatctctttggcataatttccgtttactcccagtgaggcggtcagtatttcggaatgaatggcatccagtgaaatttgaacaattccctgataccctgtttcctgtacatcttgcaacagtttttgggttacaggcattttggtcgatatgaattcgggggcaataccccgttttaccaattcttttaatatgattttccagtctttatgcaggaatatttcaccacctatcagatttacttgttgtacttgcaggtctgaagcttccttgatcagctccatcatgcgttgggtggtgagtggggattttatttgcgttgatgtatctgcatagcaatacttacaatgcgtgacacattggttggtcagcatgaatgtgaggagcaacggaccggaatacagccttcttgtagtaagatccagttttttccagacaaaagaatttgcttgcagccggtcaaaacgcaatgctttgcctgccttttccgcttcaatcaatatacgtttgggaaaataaatttctccctgctgggaggaggtataaatgggggtcggattatcaatgaagtccgatacccatttgatcatctcctccttgctccggcagaagaagtcgcacagcagagggagagttgtctgcaaaggtctgtcatacgtgaaaaaactcagcatgacagcttgcagcgggtgaataaaagtatgccagttccgggagcagtcggtatctgtccccgtactggagaataatgcgaccctgtgaatatcatgtctcagatgataatgagggttcagcacatatactttattcatttccggtattttcatcttgtgtttttgtaggatcgacgaatccgcctgtatagcatcccaggccacatttggataactccttgtcatctatgccaccttgtacgtccatcagttcgttcaagtccagcacttgttcttcatcttcggaatagcgggtgtattccggttgcttgttgtcggggtcttcttttttcatattcttctttgtttaagttggttattctctgtagtgaaaaaaacggtgttactccgtggtggaaaacaattcatacacgggtgcgaaaatcctgctcagtatgctccggctcgaagtgatgatctccgcccggccggacatgtctatttcatattttatttcctttctgttggttgtcaccagtccgtccggaaagtccacttccacggcataacttttattgtaaggcacaaaagagacggaggcgattcttcccggcagtacgccatacgagtgggtggggtatttgttcagttcgatatttactttgtcacccacggcaatttccgccacttcgtcttgtgaaagagtgatgtgcccgaggggattcccctgttgcttggagataacggtgcacagggtgtctccttcatttacccgggcgctcatgccccatgtctttccccataccactatgccgtcgtgatggcttttgatgaggtacttcttgtcccacgtgcggaggctgttcaccatgttttcgtaagccagttccagcatccggaggtttttggcagtctccatccggtggtttatatccagttcaaagagttcgcgtttcacattcagcaccgccatggcatctgccttaccggtactttccagtatccggagttcttcatccaggtattttttcttctgcggatagatatcaaactcctgatacatcacgcacgtacgcacggcttgggtgaactgttcgtaggcggaagacatttcacccatgatgaggtcaaagggatagtcttgcaggtacttgatgtcgttggtgcggtagtaccattctattttggtcagtacgcggcaaaatgtttgtacgtcttccagtagggcagtatttttcagtatgcccagcgtgtcgttcttttgtacaggtgattggttttccacaaaaaagcggtctatcattcctgcctgattggcagtgatccattccgcacttcccaagtcatcaatggttatcgtttttcttattgtgtcaggatacttaaataatgccgtgcctgcaataagaaaaacaatcagtccatatacgatgtagcttcccgtatggatcaaccattcgggcatatctcccagcatatcattgttttcgcggctatatacttctaccttttccggtccgtccgtattaggtttatagatttcctccataccttattgctattattttttaattctcaattctcatttttaaatttcctaagcgctcagttccagctgattcttcaccagcctgtagtaatcaccctgccgggcaatgagttcttcgtgcgtgccccgttccgttatctccccttctttcagtaccactatctggtcggcattctttacggtgctcaggcggtgcgccacgatgaccaccgttttgtccttgaagaatctctccagattttcctgtatcactttctcattgtccgtatcgagcgcattcgtcgcttcatcaaaaaacaggtaatcgggattacggtaaatggcgcgcgctatcaggatgcgctgcttctgcccttggctcaatccttgccccgtgttacctattttggtgttatactttaaaggcaaggattcgatgaactcacgtatatttgccatctctacggcatacagcaggcgttctttgtctatcatgctgccatccggcgctatgttgttggcaatggtatcgccgaatatgaatccctcctgcatcactactccacaatgtttgcgccactccttgaaactgattttttgtagcgactgattgcctatcatcaccgctcctccgatgggaggatagaatccgagcatcagttttatcagcgttgttttcccactgccgctgaggcccacgatggcggtagtctttccggctggtatgtccagcgatagccctttgatgatgcgtttcgatttttctgatccgtaagtaaagactacattttgcaattgaatcgggtctttgcctgatatttgggtatcctggtccatgccttctgtctcttcatcgggcttgccatgtatttctccgagacgttccaggctgagctgcgcgtcctgcgtgtcctgcatgaaggaaacgaattggctgataggcccttgcatctgtccgatgatgtactgtatggaaagcatcacacccagcgtgatgcttccatgtagtacggcggtggcagagagaactgttatcagtacgtttttcacttcgttgataagtacggctcccacctgctgccactgccccaggttgagtgaactcatattaatgcggaagagagaagcttgtatgttttcccattcccagcgtttttgctgttcgcagcccagcagcttgatgtcctgcataccgtagatgagttgcatcaaattattctgattgacggacatctgttcaaagttcttcctgttcaagtcggcccgcttgcgcatgaacagctttacccaacccatataggctgcgctgaacagaatgaaaatgaggaatattttccagctgtatatggccagcacgataccgaagatgactaccgtgagggtagagaacaaaatattgagcacggactgggtgaggaaactctcgatgcggttgtggtcttcgatgcggcgtatcaagtcgcctgccagtttgctgtcaaagaacctcatgggcagccgcatcagcttggagaggaaatccgagatgagcgacacgttgacgcgcgtactgatgtggagcagtatacagcgccggatcacctcaataagtgtgcggctgaataccagcatgagttgtgcgaccaaaatgagctgtataaaattcagattcctgtgccctatgccttggtctacaatggtttgggtgagaaaagggaagaccagttgcagcaaactgccggccagcaggccgatgatgagctgtatcatcgcctttttgtagggacgtacatagtgaaacagataccataatgacagcttttcatattttatgggttccgcttcataaaattgcggggtaacatccagcaagagggcaattcctttttctattccgccttgtgtggtactgatccagcattttttcaactcctgttcctcatatttcagcaatccgtaggcagggtcggcaatgtagaaccaagttttgccccttttcttttctattttatagaggaccacgaaatgttcctggttccagtggatgatgcatggcagttttgactgttgtttcagtttttccattgaagtgcgtataccggtggcgcgcagccctatgctggctgccgcttcactgatacctagcaagttaactcccgtgcgctgtatgtatgattgctcgcgtaactgctgtacggagaatgtctttccataatatttggctatcattctcaggcaggaggggccgcagtccatgccgtccaactgtttgtagaatggaaatttgctcataattgtcttttttgttttactctgtttatcagccagtcggctatttcgttcatcctttcactttcgctctcaaagaaggcgcacaggtgtttttgccgttctatgatgtattcccggtttgccagtagatcaatgatctgcctgtccagtttcacgggggtaattttttttatttcctgtggcgtgaactctgccatgggcacatgggcaaaggtgcattccgtccagtgggttattcctccggtgataagcgccatgtcgcacaagggcaacagggcttgcaggcggggcaggcggtaaatggctatattgggcggtaatgaaaacaaccgggtttccacctctccatgattggtcagcaggatgaattgatattgcggatggatgctcgcactctgctttatggctttgtagaatgattccgtatgtgagggggtgttcacttttctttcttcttcctcgtcttccagcaagcctataataacagtgcgtgaacggtcttcttttatttccgtcagtttgtcgatgaaatcgtcgtcttttgcaccttgcggcagcaatttataaggaataggcggcagggtgacgacgggcatttccggcattaggtctatctttctgtcggttttgtttatggctataaacagatagtttatgtcatattcattatagacttgctgcttatcttgcagttgatagtccagcaatgccaaatgtggcgtaaaccatcggaaatcatgtggataaatgatgcgtcctattcctttccgcagcaaaccggtagtgaaaacggagtcggaggtatcggtataatagaccttgtttccccgttcactaattaggtatgccagtcgggtggtgggacatacatttcctgcatccggttttatatcaaaaagaaattcaaacatgccccgtttttctcatcacatttcaattcgtattatcctactactttaaagcctaatgacgtatatagatttttgccatcataataatatgttcctaagaatttatcgaaaaggatgcacacttccagttcatcgcgcatataggcaatgtactcaaagagagtggaacgtgacatatccatctttgctgcaaattccttggatgtgcctgtgcacttgtgccggataagaaaatccatatagaggattttcttaaggtctactcgtttcatggtctttgtagttttttaggatgaataattagggttatcttttaaaagctccaaccaagtatttcccatcttcactagttagttctaatgtatattctccggatgggaaactggctatggaaatgataatatagcttgtttgtgcttggggcactaactgttcatacatcacttctcctgtttgattaccggtgatggtaatttgtatgtcacagtccggagatgtgttttcaatgtagatgttctggccatcggtgcaggctgtgatgggaatagatggcaggcttcgtgtattaactttttcttgattgctataccacttcccatttataataatttctgtactattacaaaaagaatacactttctgcaccgataaaccactaagcaatatggtgaataataccatacgcaaactccaaatctttaattctttagttgttttcataataatattattgattgattgttatgctgcaaagttatggatttagaatgaaaaacagatagaccggatatgtacgttatatggacaattaaaaaagagataatatgctaataattagaatattacctctttgtgcgaatgcggaatgtggacagttgcttccctagaactcccatagccacagatccagtgtctgtcctttgccgaatgctcctatcttttgagtgatacgttctttcaatcttaattttcttttagataccgaagtcgattctatccccagcaaatcagctattcccggattggctattcccaacttgatgaagcagcatatctgcaaatcgctttctgtcaatgaaggtacaagagtggaaagccttactatataattatcgaataatagattcattgtttcctttacctcttcccattgctcgtctttcatgtattggggctttgtctttagccggtaaaggacatctgtcttttttatcagttggttgcacaggaatctttcacgatcatgcaatcgttggttttcttctcctaaaagtcccaatctttcaagttctttggacttttcattcagcgaagaagaatatttatcaatatgttgctgcaacattttattctcttgttgcagggcttcattttggcattttatttcagatagtacattcttttgctcctccaactgttcctgcgcatctttattcgcctccatttgttctgccagttccttcatgcggctttggttacgactgattattctctcattctcttgtctttttaaggtattcagctgtatttcttcttcatgtctttgtatgatatgctctttacggattaattttcgctggtatatatagataaggatagctatcaggcagaataccactaccaatatgattagtacattacggatgatagtattattttctatttttagctggttcttttcattcaatagtttttgctggttatacttttcctgcatattcataagctctttatttttatgcaatttccagacagaatcttgataaactaccatactatcgcaatataggctcattttttcatagtcttttttctctttgcttagattatataaaatttcataagttgcacaaatcgtttccatgcgattggaggataatgttttattcagataataataggcagaatctgttttattaatgcgtctatatatgtcaccaattaccaagtaactttgttctagccttttttttaggggtaattcgcttgtttctttaagtattaaagctttttgggcataggatagggcaggttgataatcttttgtttcggtatatactcctgctaattcgttcattccatttattaatataccattattatgtagagtttctgccatttgtatagcttctttataatatttgatgctattatcaaaatcaaataatacggaatatacttttcccaaatcataatatgcagaacatatataattcttattttcggatagtttcgcatagtgcaatgactgtttaaacatttgcaatgcatattcattcagcgaattatataggtatatatttcctatactgctataaatcaaatgtgccagttgatagtctttcgtcttttctacttcttctattgcttttaaataggattcttgtgcttcattctttttatcagctttttcatataatacacctttataataaagtaccattgctttccgttggggattgttttgcttcataaagtaatcataggctatattaattaaggtagagtcagcaagttcttctttataattcttatacttggcttgcactgttagcaacgcccaagtagcattttgcaatttgtccgatactgccggaactttcatcccttgtaatacacccagtgcactatccggatgttcatacatcaccgcttccgcttgaaccaattcaagcaacaacgcttgttgagaagcattttctttttttgtgcaggcagaaaggagtatacttattattataataataaagtttctttttattccaattgtttttttcatagtatttgcatttatgtatagcgaacaaatatagaaattaaaaacgatattgaaaagattttatatcactatttacaaaaaaagagtgattgattatagtttgcatccagtgttgatagaagtattatggatcttaaatattcaatttagtaaggaggcatgccctccttactattttatgtataaaaacggctgtattatgtatatctatttgaatccacaatatgtgattagaaacgaaaataattgttcttatatcattgctaaatcagctttaattactgctaagctagaatatgccatggcttttgcaagcgtagttccaccttctattggatatatcttgtcacatattggagaaggagaattaaatgcttcaatagaaaatatagcaaataccctaaatataaaaccagacctgatagataagtttattcgaaaaataatcgataatccagtaaaagtaggatggaattataaaggagtgacgatttcttttcccccgtatctgctgacttctgttaaggaagaatcggagggaagtgtttatacggataatgaattattttatactacagactttatacctaaacgtccttctgttccgctgaatcttaactttatgattacaacccaatgcaggacggattgtatgtattgctatgcggatagaaacaggaagaacgatttgacaagttggcaaattataaaggtgatagatgaagctcatgatatggggggggaatctggctttgacaggaggtgatatttttgctttccctgattggaaagaggtgatacgaaaagtggggcaatatggattcacacctttattgagtacaaaaataccgctaaaagaggatgatatttactttttaaaagagtctggaattaaattcttgcagttttcattggattctatatttacctctacattacagacaatggtacgtgtaaaagaagactatatagataatgtgaagcaaatgtttgagtattcttaatccaatctgtggtcagattgataagaaaattataattcgcaaataaaaatgaggattaaacttataaatatttgtaacaaatgattgaagcaagagcattagtttctattaattttctgaatttgtcagaaaactatgattttatgtcacgttggttaggtgtatatgataaatatgcaaagctattgaaaggttcgtcggatgcagttgtaaaagatggatctggaaagatacctgaatcagcaaacgataaagtggatttaaccaacaagcatttggcattacaggctatattagctgaatatggtcaaaagttaaataaaagccatctttattctgaaacagtcggtctgtccgaagcccatgatattcgtcgcaaatgtttcagcgcattacagatgaacatcaagagcaagagatataggaacaaaagaagatcaagatgctgcaagaagccttattgatcagactggaaattataaaatgaataagataattacccgttccgatatgtctgcccgcattgcaggttacattttgattctgcaatcagagaaaaaccatgattcagtagaacgactgaatctggctgatcgcatcactgaagtggaaaaggcaaataatctttatttggacttagatacacagcgtggtattgtgaaagaacagaaaggtctttcggctactagtctgcataagaactgtaatggattattgaatcagctatattcattggtaaatgatatgttcttttattatgataatgaactgtttattgcctttgccgatgaactgaatgctgtggctgaatcttatcaattggttatcaataaccgtaaggcagatgccaagcgtaaaaagaatgagagaaagggcctaaaattattgccggttatcaataactaaggtgcggcaatgaattgatctgctacttgtataagcgattctataagactgccttaaataaaagtgtggttacttttatttaaggcagtctttctatgagaatacgaaagaatgttaaatgaaatttttttttttgttcagtccggaggtgtcggactgtgggagattacatttgcaatatcaaaacaaacccttattgtttaaccatttaaaataaattcattatgaaagagaacaatgaaaacaaggctaaagccttggaggaaaacaaaaagaattattcttctgaaaattcaactcctcaaaatggagaagatattattagtaatgaagatgctgaaaagctggaaggcggtattaagcatgaagatcttgaaagaccatctgaaggttctcttggtggaatcatctgctgcaatggttaatgatttgtttcagatcaatctaaaaagattagtctgaagtagaaggtacttagcgataagtaccttctttatcttaatttttatatctgaatatatgataaatacttaccattataaatagattcttatgattataaatgatttaactataaaatatacattagcaaataattggatattaagaacagatccatattatgaatctagaaaatattctgtttatgatattacttctcgtttaaccttgtatgtgacaagatcatgttatactcttttgaaaatatttcatgataaggctttgtctttttcaagtttgtatgaagctattgagcaaaagaatattaaaatagattgggaagggttttggaatctttgcaaggaggtagaacctttaaattttttagttccttcggaatttccattacataagggagatggtttccctaatggagatggagtttgtggttatgatgttcctattacatctactcctttaactgctgaattgcattttacacataattgtaatttaagatgcaaacattgtttccaaagttcttctcctaatagtagtcgatacaaagaacttggggtttctgactggattggcatttttgaacagtttgaggattgcagaatgcataatgtgacacttacagggggtgaaatcatgttttatccacatttttctgaggtctttaataatattgtcgataaaaggattaattatagagtactaactaatggtacattaataaatagtagtaatgttgaggcattatctagaaaaaatgtatcattaactatatctttagatgggcactcggataagcagcatgaccagctgagaggaaaaggagtctttaataaagttgtaaaaaacattgaacttttggtcgctcatggtgcaaaagtttccttaacatacactattaattcaaataattatctttatttacaagaagctgtaaagttagcaatttctttgggagtaaaaggtatcttctttggatttacagatagaataggcagagcaaacgagaatttgactttaatattgtcacgctctcaacgtgaaattgtaaaacacaattttgctcaattagaggaagaatatggtcatcttctgagtttgtctttagtagaagttgctactttggaacgctatcatgaatttgttaacaacaaagtttattgttctgccggaacaacgcatattggcgttagttcggatggaaaattatatccatgtatttatgcttttggacatgaagaattgcttgtaggagatcttacaaaagaaaatttgaaagaactttgggaaaatagagataaatggagaatgttccgaggaggatttagtttggaaaatatagatacttgttctacttgtacattaaacaaaaagtgttcactgatgacttgtcgtctaaggaattatgatcaaggtaatagcttctataataaaccgatagaatgtgccgttgattattctatagctttgtaatataatgtgtttttgaaactttaaaaatatagaatatgagagcgaatatacttttttgtttatacttctttatggggttggcagtgcagctgcaagcacaggttacggtaacaggtaaagtaattgatgagcaacaacaacctgtcccttatgccaatatagtgttactttctttgcccgattctgctttcgtggcaggaagtatcagtaatgaagaaggcgcgtttagtctcaatgtcaaagaaacaaaggatgtgcttcgcatctcatctattggctatgctactgtttatcgtccattagataacagaagtacagatcttggaattatctgtctcgcttcagacacacagatattggctgaagttgtggtaaaagctgatatgcctgttactcgcatgagaggcgacgcactggtgactaatatacaaaatagtgtactctctaaagccggatcagcaagcgatgtattgggaaaagtaccgggtgtaataaaagagaggaattcctatgaagtacttggcaaaggaacacctcttatttatatcaatgggcggcaggtacgtgatgattcggaattggatcaactaaattcggaagatattaagagcgtagaagttgttactaatcccggtgcacgttatgatgcaactgtaactgccgttatccgtatacagactatccggcgtgccggagatggtttcggcttcgatctccgttccagttactatcagagccagaatgtagacttgatagagcaattgaatgtaaactaccgccataatggacttgatatttttggtatattccgttatttaaagaacgaatatatcatgaaaaatgatattgtacataccttggagtctgattctttatggaaatatcagaatttattggatggaactgtagtagacaagtctttacgaggtgaaataggagctaattacagcctgaatgataaacattcactgggattccgctatactcttacttcccgtccaaatacgaagtcggatgtatttacctctaatgatattacagccaacaatcagttttatgaccacttggaaaatcaagagtattcttctacttccggtaagcctactcatcaactaaatgtttattataatggtactgtgggagatttgaatattgattttaatacagactattatactaatacttctacaggaaaaggtctttatcacgaagtcagtcaagagcaagaaagtcgggatgtgcatacacagagttacattaggaataaattgctagcttctaaattggtactttcttatccgttgtttggaggtaatctttcggtaggcggagaatatacggatacccgtcgcaatgacgagtaccgtaatccggagaaatatgtggaaagtaccatcagtcgtgtagaggaagatggattgagtggctttgccgaatacagccgtcagttcccgataggtaacctttcattgggtgtaagatatgagcatgtaacttttgattattataaggatggtgtgcacatggatgaacagagccgtatgtatggaaactggtttcctaatctttctttttcaagaaaactaggttctgtccggacacagttgagttatactgctaaaacgcaacgacctacttatagccagttaagcaacaatgtcacctatgtagaccgtttcactatgcaacgtggtaacccattgctggagccgtgcaccattcacgatatttcattggtcggtacatggcgttttttacagttacttgtcagctatcagcagtggcgtaaggaaatcatttattggggagatccgatagataatggcaattcaatgatgatgacttacctcaattatcataatcgtccgactttgaatgtttctttctctatttcaccggctattggcttttggcatcctaacctaaatatcggcgtgaagaaacaatggatgacaatagatggcatagagtttaataagcctcgtcctacaataaggttcaacaatacatttgaacttcctggtgattttcttgtcagtttggatgggctttttatgggaaaaggaaattatcagaatttgtatcagttcaaaaattatggtacagttgacatctctgtccgtaagtcatttttaagggatgccttaagtctggaacttcgagggaacgatctttttcatggttcacgtaattattggcaaacatattttggcagtattatttgggagcagactaatcaatgggatactcgtgaattttctattactttgcgctataagtttaatacaacaaagagcaagtataaagggacaggagcggcaaatgatgagctaagacgtttgtgataatttcaaaaaaataaaaagtatagaacatgaggaaagtgattttactactcggattagtgttacaagtgattattgttgacgcacagagtgtttccggctcattagttgatgaaaaaggaaatcctgtcagttttgctaatgtggtattgctatcttccaaagattcatcttttgtgcaaggtacaattagcaatgaacaaggaattttcagcatagaccaaacaagcggtaacaatatactcagaatttcttgtcttggctttattccgatgacaaaagcctatgctcaatttccggtaacgattgtgatgcatgaagatgttaatctgttgggggaagtcgtggtaaaggggaatcgcccgtcatataaacttactgctgaagggttgcagacccatgtgcaaggaacagtacttagcaaaatgggtacggcggaggatgtgttgaagcatataccgggacttcagaagaaaaatgatgcgtatgaggtatttggaaaagggagcccgataatctatgtgaatggaagattgctgcgtgatttgtcggaactggaccagctgaagtcagaagatattaagaatgtagaactgattaccagccccggtgcaagatatgatgcgtctgtgaaagcagtaataaggaagatagggttgtcacttctaccaatacattgagaagtgaactctttgctgccaaactggtgctgagccgtccgctgcttggaggaaatgtcatgataggggctgaatacagtcatacagagcggcaggatgattatgtgaatccggaaggttatgtgccgacttcattcagtaaactgaaagagcagaatatcagtccgtttttagagtatagccgcaatacccccatagggcaactctccgtggggggacgttatgagtgggtgaactttgattattatgaggatgggaaatatatggaaggacaaagccggaatttcagtaatttctttccgagtgtttcattgggttctgaaataggcggagtgcagttacagcttagttatgcggcaaagacgcgtcgtccgtcctaccagcagttgagcaataatgtgacgtatgccaataggttcacgcttcagtccggcaatccgttattggaacatgaggtggtgcataacgtttctttgatgggggcatggaagtttatgcagtttagtgtggattataatgacagaagaaatgcaatcatttactggggggaacaaatggagtataatccggcggtaacgcttatttctttcaaaaatcttcatagcttgaagtctgtttcagcattcttgtcattggcgcctaagtttggaatctggtcgccgcaattgaattggggagtgcagaaacaatggctggatctggagactaccgatggattgctgaagatgaacaaaccgatgtttacgggggcttttaataatacgtttaattttaatcacggctggatggcttcggtggaaatgaattatcaaagtaaaggcgatatggagaattgctcggaaaccaagaatattttttatgtggatgccggggttacaaagttcttttggggggataggatgtctgtgaaactgagtggtacggatttgttccatggtatgaagtctggaaaccgtatgtattataaccgggcatcttctttgcaaattaataattatgatagtaggaaagtgatgctgacggtacgctataaatttaatgctacgcgtaataaatataagggtagtggtgccggagagagtgagaaggaaagattatgagtgcctacttttcacatttcatttgttcttacccagcttatataccatttggcggaataaaggtacgtttaaccatatatattcgtaccaatgttctacctttcttttccatagtttgctccagctatatatttcccaccattttagatggagatttgccgaattcataaaatcttgtgtgggaaagagggtcagggctattccttttatccataatgttttcatttcgtccgcccaatattgcatgagtccgaattctggttcccagataatgaatcgggattcatgaatgccgtaacagactacatatcctggtacattgaaatcattgagagtgaaaaggatgatgggaagttttctttgtgttaattgatgaatgttttgcaaacatatttcggctttcatgccggaatatatagccccttgtttcattcctgccaaggtaagctttccatttattttgcaccattcggtcaatgtatgtatgtccgtttcttttccgttgtaatattttataacagtgagcaggcaagctacctctacagggcacttagcattggaacggacaaatgatttctttattttatcaagttcgtattctgtcataacccggtttgttttataagagaaaactcatggagcggccgcaatcacttaaaaaaagaaattcattggagcgattaacgttcatttggacgtggaagtaggtatgaacgctgaattactttaataagtgtgcggccggagtctgcatgagttatatctgttacgtcctgctctttctattaacatatcggctattttgtttatttcccgattcttacgctcaaagaaatcgcataactctttcgccttttgtgttagtgttgttttattttgtaatgcatattctatttgttgctccaatttcatcggagttatgtttatcatatctttaggcgaatatttcagtaccggtatttgagcaaaggtacaatccagccatgcgtcagaatgtgagtcggtcaaagccaaatcgcataatggtaatatggtgttaaggttcagcgtgcggaataattccatgttgtcgggcaattcagacgattgatatacatttggtatgtcggtcaataatatgaattggtaccggggatttctgatggaacttctttttataactctataaaaatcttctagaatctttgaatttttatttccttttcctaataatccgacaataatatttctttctttgtcttttttaatatcctgcaatctctttgtcaatgtttccaaacgtggtccggaaccggatgacaggtagggagtgggtggcagataaagtatagaaatatctttgtcctgtatgtttttttggtcaggcaactgcatggctatgaaaatatagtcaatggctagctgccgatagagggaggcatgtgctgcatgccgacaatccagaagcgttaggtcgggctttaaccaacggaaatcatctggataaagtacgcagttgcttattcctttatcatatagtacaggcgtaaaagcagggtttgaggtgtaggtatagtatacctcttgtttcttttcccgcaatatccctgctaatttgatggttagcaataactggcttttgtccggtgctatgtcaagaaggaaattcagcatatattattgcgttaatatggatttgtttaatgaactttttggacaaattatattcatagaaattggaactttcatgttccaatttctaatgaatcaagttagtggtttaagtatactttagttgggttatgaaaacaggtctgtcactctttagtgaaatatcccgttaaatgtccggaaggtgtacctgttatttctagtttatattcttctgcagggaaatttgcaatagaaattgtgatgtaagcgctctgtacttcaggaatatcattttcataaacgacgcccccttttgccatatctgtgatgcggatggtcatatcacggtcgggtgacgcgttcttgagggtaaggagatagccatcggtaaatacagttatggggcaattggtagcagcacttctaataggatcatcccatctgccatccaattctacatctttaacaggagtttctgttgtattggcttgtacaggcaaaatacctattaatgtagttatgataataactatactccatatctttttctttatactttttaacttcatgactttatgtttgttttaattgttttgtttggggcaaagttagaggataaatcttaaaaacgtgcagatatcatgtggacaaatggaaaaaggtaataagttaataactagcttattacctttttttataggagggcgatatagacaattgtttatttttagtattccataagccataaatcaaggctttgattttcgcctaatgaacctatttcttgtacgatgcgttcttttaatcttaattttcttttggacacagatgtgggcgagatggctaacatattggcgatgtcaccgttgctgaaccgtagttttatcaaacagcatatttgtatatcaccgtctgttaaggaaggtatctgatgacatagtcttttagtatagttatcgaataataaatctattttttcttttatttcttgccatagtttgttgtctatatactttgttgtttttagcttattgaataattctgtctgcttaatgagttggttacataaaaaagcctcgcgtttatgtagatactggttttcttttgatagatgttccatagcttccagttctttcgatttttcttttaatgactgggcataattgcttatatgattttgcaggttattgttctccagtttcagcgtttcattctgttgttgtatttcttgtcgtattttattttgttctttccattgttcttttatctctaggcttccttccatttggatcgtaagttcttctatccgcattttgttgcggtttatcaatgtctcattttcatgtattttcatagtgaaataacgaattttttcttctttctccgatatctcttgtttttgagaaactatttttcgttggtatagatagtttgttattgctatgatgaaagacaaaatgattaaggcaatgagcacattgcgtatgatccggtctttctttatttgtgacagattattttcattgattattttttgctgatcatatttttcttgcatctctattaatgctttattgcgatctgttttacctattgaatcttgatagaaccatagcttattactgtattctactgcctttttgtaatctttttcttcttgactaatataatatagtgcttgataggcgctacgggctgtatggatattaggtgacaggcaagcttggtttaggtaaaaatatgcagaatcgtacatttttaaatagcgataagtatctcccaatgaaaatattctttgatcagtcttttttattttaatacaatcttttgcatactgaagagcctttttattttctcctgttttaagaaataaaaaactggtttcgttcatggcgcttgccaatatggtaggatagttattcacttgtcctatttttatagctttttcataatattctatcgctttattatattgttttttctgtgaaaatgctctggcgatatatatgaaagagaaagctatgtatgtttggttgtcggatagttcggcattatgatgtgctttttcaaaatattccatagcataatcatttagttttcgatacagatacattagtcctacctctgaattgataagaaagcctaattgataatcatttgttttctctatttcagtcgctgcttctagataaaatgacaatgcatcttcggcatgatgactttcatggcgcaagatacctttataatatagcgccaatgcctttctttgtgcattatcatgtttggtgaaataagagtaagcgatatttattaaagaatcggattgttcaatttggtttttatattgagcttgtgtcatcaataatgcccatgtggcatattgttcattttcagaaggaatgtcaggttgtatgccctgtaatatatgcagtgcgctgtcgggatatctgtacatcattgcttctgcctttgccaattcgggttggaaggctgtggggtagttcttgttgtgtgtacaggatatcagactgataattatgctaattattagccctgcatatttgaaactgctcatagtaatcatttctatattattggcgataggaatcttatgggatatgttgcgtaagtgaatgaattggttgattttataggaaaagtttgaagattgatgttttctgatttatcctgccatggtataatataaagggatgtgcctgaattattttaaatacggaataaaaaatcaggcatgtcccttcattatagctggggtaaccctttgaattgtctgtataccattttttaagtagttaaaatcctaactttaattttacaaactgtttgatgaattgtactgttccatcaatccccaatacggacgaatcaatgcataagtgataagtttcggcagctccccacgttttgtaactataataattatagtaagctgaccgttttttatctgctttttccatcaattcttcagcggcttctgtagaaatatgatggatatgcatcaatctttcgatgcgtgcttctttggaagcagaaacgaatatattaacgcaacggggatggtcacgcaaaatgtagtcggcacatctgccgacaaacagacacgattgtttttcagccagttcacgtattacgtcgctttgtattttgaacaaagcgtcattgctcagacaactgccatagggaatggctccgtcgctgataaaaggaaaacgtgttccgaacagaccgccgataatgctttgagaagctttttcatctgctttttcaaagaattccttgcataggccgctctcttccgaagctagtttgattaattctttatcgtaaaaggcgataccaaactcttgggccagtttttcgcctatctcttttcctccactgcctagttggcgtcctaggttgataacataatgctcgttcatagtcgttgtctattgattatgtgggcaaatataaggaaactaatttttaattcttaattttcaacttttaatttgttaccgtgggtcttaaaaatcttgaactggcggtaaagcatgattcctgcgacaacacttgccgccaagtctgatattggcatactccaccaaattcctgctgatccccagcaaagagggagcaggatgatgctgggaagcaagaataataattgtcgggttaatgacaggaagatggctttaccggccatgccgatactttgaaaaaaattggacgttaccatctgaaacccgataatgggaaaaaatatgactacaatgcgtaagccggtagctgatagctgtatcagtccctcatgagtggtaaaagcggatacggccaattcgggcatcagttcacctactagaaaaccggttgttgtaacagcggtggcgccataaatggtaagttttaatacctggtttacacgatgatattgttgggcgccaaagttataaccggctatgggttgcattccttgattcagccccatcacaatcatgacgaacaggaaaacaatccggtttacaataccaaatgcgccaatagccagatcgccatcatattctttcaaacctttgttaatgaaaattacaatgaagcatgctgccagattcatcaggaacggagacataccgatagcgatggtgttttttacgattgtaccgcgcagtttgtaaatgcctcggcggagatgaagcaactcgttcttgttggtgaaggtcttgaattgccacaccagtgagatgatttgggccagaatggtggcaatggcggcaccctggataccccaatggaatagatagataaagatagggtcaaggatggtattgataattactgtggtgatggtggctgtcattgctttttgtggatgccccgaagcgcgtagtaaggcattcagtcccaaatacatgtgggttataacattgcccagcaggataatgaccatgtagtctcgtgcataggagatggtatccgggcttgccccgaagaagtagagaataggatcaaggaaaagcaaggttaatatactgaatcctatacctataataaagttcagcgtaactacgttacccaaaatgttttgggcggtagcataatctttctgtcctaattttacggaaactaatgtggaggcacccacaccgaccagtgaaccgaatgcagccgccagattcatcagcgggaaggtgatagccagtcctgaaatagccaaagggcctacaccgtgaccgatgaagatgctgtctaccatattgtatagggaagatgccgtcatagcgataatggcgggtattgcatattgtaaaagtaattttccgattggttgtgttcccaattctgtgggggttcctgtttttgccatactttattttctgtctttttacctgtttaacctgaattcggctgcaaaggtacacaaaaaatgagtgtgagggaaaagtttgtttatctttgcatttaaaaaaataaacggaatagaattaatgaatagtcaaaaaggaatagtgggctgcttgctattggcatgcaccttacaaatgtcggcacaagtaaaaacgtataagtatcgtgtaaactttcgcgataaggcggaaacaacctatgcattggacaagccttcggcttatttgtccgaacgtgctttggagcgtcgcatgaaacagggattgcccgttgattctacagatattcctgtgtgccggagctatatagatatgctggtcggaaaaggagcacagcttgtatccaaaagtaaatggaacaatacagtggtagtgcaggtatccgacacgtcggttattgataaagtggcggcattgccttttgtgacagctgtccggaaagtgtggacagctcccgacagtattcctgcccgcaatgccaaccgtaaaaaagaggtgaccaatagggtgacaaagagtaataactattatggggatgcgtggcggcagattgctgttcatcacggggacagtcttcacgctgcaggttttcgtgggaaggggatgcagatagcggtcattgatgccggtttttataatgctgatgaaatcagtgttttcaaaggaatggacttgttgggaacacgcgattttgtaaattctcactcggatatttatgccgagaactatcacggcatgaaagtgttgtcttgtatggctgccaataagccgaatgtattggtcggcacggctcccgaagcttcatattggcttctccgtagtgaggatgatgatacggaacagcctgtggaagaggattattgggcggaagctttggaatttgccgatagtgtgggagtggatgtggttaacacttcattgggatattatgagtttgatgatacgaccatgaattaccggtaccgtgatttggacgggcattattcattgatgtctcattccgcttctttggctgccgataaaggattggtgttggtatgcagtgccggaaattcggggcgtggcacatggaaaaaaatcacacctccgggagatgcggaaaatgttattacagtgggggcggcggaccggaatctggttaatgctgatttctcttctgtaggaaatactacagatggccgtgtaaaaccggatgtgatggcggtgggagttgcttcggccgtagcgggtaatgatggaacggtttctcatgccaatggtacttctttcgcatcgcctacattgtgcgggttggtagcctgtttctggcaggcttgtccctggcttactgccaagcaggtggtggaggcagtgcggaatgcaggagaccgtaaagagtatccggataatatttacggttatggtgtgcctgatatctggaaagcttgtcaaatagaattagagaagaaaaaataatggaagaacatcctctttctttatatgaactgaatgcgttggttaagcgtagcattcatgcttgtctgcccgatacttattgggttcaggcagagctgagtgatgtacgttccaattattccggtcattgctatttggaatttgtacagaaagagccacgggggaataatctgatagctaaggcaagggggactatttggagcaatgtctaccgtctgctgaagccttattttgaagaggaaaccgggcaggcttttgttgcaggtattaaagtgatggtgaaagtggctgtggagtttcatgaattgtatggttactcgcttactgtgcaggatatagatcctacttatacattgggggatatggcgcgtcgccgtcgcgaaatcttgaagcaattggaagaagaaggtgtgctgactttgaataaggaactggagattcctttgctggcgcaacgcatagccgttatttcctcggctacggctgccggttatggtgatttttgtaatcaactggaacagaatccctatggttttgtcttttatccgcgtttgtttcctgctattatgcagggggaacgggtagaacaatctgtcattaccgcattggatgctatccatgcctgtcgtgatgattgggatgtcgtggttattatccgtggcggaggcgccacgtccgacctttcggggttcgatacatatgagttggcggctaattgtgctcagtttcctatacctattataaccggtatagggcatgagcgtgacgatacggtgttggactgtgtttctcatactcgtgtcaagacacctactgctgctgccgagtatcttataaatcatttgcacgacactgccaaggttcttgaagattatgcatcggctgtacttcatactatctctacccgtatggaacgggaaaatacccggctgaaccggatggtagaacgtattcccatgcagacgcggatgaggctgaaagaggaacattatcgccaggaacgaatcatgaaacatttggaagtaggcctgcaatcccgtctgacaaaagaaacccattgtttaaaaatgatggaaactcggttgggcatcgtttcacagcgtcgtctggtaaaggaaaagcatcggctccaacttttggagcaggaattgaaggcggcatctcccgaaaatttgttgaaaaggggatatagtatcacgctgaaaaatggcaaggcggtgatcgatgcttctgtattgcagccgggtgatgaacttaccacccgttttgccaaaggagaaataaagagtatagtaactaaaaaataaaacgaagtatggcagcaaagaaacaaacctatgaacaggctatgaaacgtctggaagaaatcgtatcacgcatagacagtaatgagttggacatagacagtttaggtgtgaacctgaaagaggcacaggaattaatcaagttttgccgggataaactttataaagccgatgaggagataaagaaaatgttggataataatgtttcaatgtgacaatatgctaatgtgccaattggctgcgctatattctgcatggcatatttgtaccttagcacattgacatattggcaaattataaaagctataaataaaaaagctgttttgattggaatttgcaaatataaaacgtaattttgctctcattcgtaaataataacataattaagatacactatgaaagagattgattgggcaaatctgtccttcggctatatgaagacagactataatgtacgttgctactatcgtgacggtgcatggggagagttggaactttgttcggaagaaacgttgaatattcacatggccgccacttgtctgcactatgggcaagaagcgtttgaagggttgaaggcttatcgtggaaaagacggtaaaatccgtattttccgtcctgaagccaatgcggaacgtttgcaaagtacttgtgacggtattctgatgccggaacttcctacagaaaagtttgtggccgctataaagaaggtggtgaaagccaacgagcgtttcattcctccatacgaaagtggtgcggctctttatattcgtccgttactgattggtacaggtgctcaggtgggggttcaccctgccaatgaatatctgtttgtggtattcgtaactccggtaggtccttatttcaaaggtggtttttctactaatccttatgttattatccgtgagttcgaccgtgccgcaccttatggaaccggacgctttaaggtgggcggcaactatgctgccagcctgcgtgccaataagaaagcccatgatttgggatattcctgtgagttctatctagacgccaaggaaaagaagtacattgacgagtgtggtgcggctaatttcttcggcatcaaaaataatacttacattacaccaaaatcatcttctattctgccttctataacgaataagagtttgatgcagctggccgaggatttgggtataaaggtagaatgtcgtccggttcctgaagaagaactggaaaccttcgaggaagcgggggcttgcggtacggcggctgttatcagtcctatccagcgtattgatgatttggaaaacaagaaatcgtacattatctctaaagatggaaagccgggtcctgtttgtacaaaattgtataacaaactgcgtgctattcagtatggtgatgaacctgatacacataattgggtgacaattttagactaatagaaaaatagattcttatgaaaacaaattcagaattgaagaatcgggcaatcgatgcgttgaccggtaattggggactgggtgcggttattaccttggtctatggactggtgatgaatgcccctacgctgccctatcgtattatggagtcggtggcttcgtcttcctttagtctcatcgctttgttgcttttgccattgggcttcggctataccgtcctttttttggatgtgattcgtggaataaagctggattttgcccgtcttttcgatgggtttaaagactatggacggatattgggtacaatgctgctgactacagtctatacgttcctgtggacgttgctgcttgtcattccgggcatcatgaagtcctattcatatgccatgacgctctttattctgaaagattatccggagttgcagtacgatgctgccatagagaaaagtatggcgatgatgtccggtcataagatgaagatgttcttgttggatttgagcttcattggttgggctattttgtgctgttttactttggggatcggtttcttgttcctggctccttatgtagaagcatcacatgctgctttctatgaagatctgaagaaagaattgggagagtccgttgaggcaatttctgaataatatagaaaatagaaagataagaaaaatagacctgcaagtgaattgcgggtctattttttttctctttcacaggatattcctacctttgcctgtggaaacaaattaatgatagactaattttcatgggaaaaggaaaactggagaaatttgctgatatgcgggagtatccgcacgtgtttgaatacccttattcggtggccgataacgttacgttcgatatgaaggggaattggaaccgtgacttttttaagaacgataatccgatagttctggaactgggatgcggacgaggtgaatataccgtagggctgggtcgtatgtattccgataaaaattttatcggtgtagatataaaaggggcccgtatgtggaccggtgcgacggaagcgctgaaagatggcatgacgaatgtggcttttttgcgtaccaatatcgaaatcatcgaccgtttttttgctccgggtgaggtgagtgagatatggctgactttctctgatccgcagatgaagaaagcgactaaacgtcttacttccacatactttatggaacgttatcgtaagtttttgaagccggacggactgattcatttgaagaccgacagtaattttatgtttacttacacccgctatatggtagaggaaaacaaattgccggtagagtttatgaccgaagatttgtatcattccggtttggtggatgacatactaggcatccgtacctattatgaacaacaatggttggatcgtggtttgaatataaaatatatgaagttccgtctgccgcaagagaaggagttgcatgaacccgatgtggaaatagaattggatgagtatcgcagttacaaccgcagtaaacgaagcgggttgaaaacaagtaaataataacagaatgatgactttatatccgaaattgattttggacgccttggcaacagtgcgttatcccggaacgggaaagaatttggtggaagcggagatggttgccgataatcttcgcattgacggtatgtcggtaagcttttcgttgatttttgagaaaccgaccgatccgtttatgaaatctatgataaaggctgccgaaacagctattcatacttatgtttcacctgatgtacaggtagctattgcgacagagagccgtcaggcggcgcgtcccgaaccgggtaagctgcttccattggtaaaaaatgtcattgctgtttcatccggaaaaggcggggtgggcaagtctactgtggcggccaatctagctgtggccctagctaaactgggatataaagtaggtttgctggatgctgatattttcggtccttctgtgcctaaaatgttccaggtggaagatgcccgtccttatgctgagcagattgacggtcgtgatttgattgtgccgattgaaaaatatggtatcaagttgctttctatcggtttctttgtcgaccctgatcaagctactttatggcgtggagggatggctagtaatgctttgaaacaactgattggagatgccgcatggggagaactggattatttcatattggatacgcctccgggcaccagtgatattcatctgactttggtgcagactttggctattacgggagctgtaatcgtcagtacaccccagcaggtggctttggctgatgcgcgcaagggaatcaatatgtataccaatgataaagtaaatgttcctattttgggattggtggagaatatgtcatggtttactcctgcggaacttcctgaaaataagtattaccttttcggaaaggagggttgcaaacagctggcagaggaaatgaatgtgcctttgttgggacaaattcctattgtgcagagtatctgtgaaaatggtgataaaggaactccggctgctttgaatgaggacagcattaccgggcgtgcatttatagagttagctgaaaatgttgtgaagcagaccgagaagcgtaatgcggaacaggcaccgacacacattgtggagatgaagaaatgatttaggaatatatttttaagatgaaaagagactgttcggaacagcctcttttctgtttttatgctctttattgcagtttgaaagttacaggaacagtgtatctgcaacgtactgctttgtcttttacagttgccggcttccattttggcatggattttgcaacccgtgctgcttcagcatccagttcgggggtaatgctgcgtactatgcttacatggtctaccgaaccatctttttcaataaccatctgtacgattactttaccttgtgctccctccttttgcgctgttacgggatattttatgttgcgtgccaaatattgcaagcaggctatcatacctccggggaattcaggcatattgtctgctatctggtatacggggtcttctccgacaagaagtaatctcaccagttccggattttccatatctttgatggggcagagttcttttaccgtgaattttccttcttgataacctttatggttaatggcaatggtttcgcctactcctactgttaactgagcttctccgtgagcgtttgtcgtggctttggcatttgttgaagaagaaataagttctactcctgcaagttgttggttatcattattggatatttgtaacttgatccgtatttgtttgccggctttgatgtaggcggcaatatcatcatcggtatcgaaaatggcagtgacattcggtttgtttgctgaaagtagaagtgattggtgtttggaacttttaggagaggaaacgtctagggaaacatacttgggagtcgtcatatccacttctatggtagcctttccttctgcattggtcttgaaagtttttacttcattacccggtttgatttgcagagtaatattaggctgaggcttaccttcactattggttacggtaatagtgaaagtcaccagaccttgtactgttgtgttgacaaaagatgccacttcttccctttcggggcgtggggtgctttcttccgtggaatagattaacctttcggctgtccgtgccacggtttcaatgttgctgaccaagagtagagcagcagtcagcggtgcaaacaaggcatatttgatatgccctgtggtgcgggttctttttttgttcatcattttaattctgttttttaagtgtgataagttgaaattattatataaaccggtttgtctgttttggttggctaatcccaaaaggtgatattgatatgctttcttatttgtgccggattccattactttatgatcggcaaggtattccaaattgagtctgatctctgttttcagcagccatgcaaaaggattcatccagcaaatgatatttactatttcactgataatgacatctatggaatgccattggcggacgtgggtctgttcgtgcgtcaggatttcttgtttttcatcttctttcagtccgggcagatagatgaaaatccattgccagaaagagaatggattggcaggttctgatagactgcgtatggatatttggtctacatttatactcttgctttttaagacaaggcggaaaatactgcttagttggatcataaatcgtgcggataataaaaggattccaatccaatagacgaactttattatatcaagcaggtcgggtgtgggaatagcaacaggagctgtgactactgtggcagtggaagtatttgtttctgtcagcatcatcagtgcgtagtaatctgccagttcattgatggcaggttgttctttcacccatgcttgcatatccatcagcggataaagaaaagagagggcaagaaaactcagcagtgcgatacgacgccactggaagaaagtgtcgcgacagcagaacagcttgtagaaagcatagaataaggcgatgcctatatttactttcagcatgtagatgagttcgggtgctgtagttatcatagtatttgtgaatttagcaggattatttatcttcttctttctctatcaagttgataatgtctttcaagtcggctgcggagattttttgctctttggcgaagaaagataccatttccttgtatgagtcagcaaaatagttccggaccacaccacttacaaatgtgcgtttgtattcgctttgtttaaccactggggtgtattgataagtgttgccgaatcgtttggccgtaacgtacccttttcttttcaggttgttcactatggatgccaccgtagtataaggcggcttgggttcgggaaatttagcaactatgtctttcacgaaacattctcccatgctccaaatatgaagcatcacttcttcttcttgtatcgttagcttttccataagaaaatgaattgattacgatgttttcgcaaatctacgaaaaaatcgtaataagcaaaaggaatgagagttaattagtgtgaatacagattgtgggcagataaaaaaacaaagtgaagaatccggctgtgatagattgaagcggacccttcactttggcatgaaaatgacagatgaagtaaagtttattttttgtgtagaatataatggtctgctaactctcctgttattgcctgtttgtcttgattgagagcggtcagggtattctcaccgactttataatattgcttatcctctccattaattaaagtcatgatattaccttcaacagagtaagttccatattctttgaaagtagcatcctgccggtcaatatattctgatatcaactcaaaagtcttgtcttttttaatagtcagggtcatgttgatacctggacagtcggcagccggaaaagttccggtgtaagtaccgtcataatccaatgagttttctgcattgtgcatatccgttgtttcggtggagattgcagaatcgttagtgtttttggagttgctgttacatgaagtaatcagcaggcatacgcatgccagaataaaaagttttttcatcataaataattcatttagttcttaatttataaacaaattcagacgacatttgttctgcgtcttttcttaatctcttttaatctttcgtatacatgtctgcggcttaaggtaatctgacgacggtatacgatgcaggtggtaaggaaataaacacctgtttgtatccacaatacccggtactctgtcagcacatcggtcagtgtggctcccatattgttgatgcgtacaaagccgttgatgccgaaagtggaagggaacagccacgaaaccacctcccagaatttaggaatggcagtacctggccacgaaatgcctgagataaatagcaacggtactgaggtaaatacataaatcatcatacaggcttcccgatggtgaataaagatagaacaagtcatcgcgaaaaagatgcatgccagtatatagggaaacatgaatgccgctagggttccggcttgagctatttgtaccaggctgaacattttgggaacaaggcagagcatataggtagccatgacagcatatatcataaggtaagtcagtgatttgcctaaaacaatgcgcagcgtgccatgataatggcggctcatggggataaggtcccgaaaacggttgttctcacgagcagttccggcagatagacctactcctagcagtaaagtttgttggataatcagtatcagtacggcgggtatcaggaagctggcaaaaccgttctgcggattgaaaatggaaatatcctcatacgctatgggagacgtgctcacttcatcttgtcggatggttgtgttgccggagcgttctatctttatctgtttgttcattaccagcgaggcattggtgttggctgtcagcatggctttgtagtatagcataccgctcatgtcacagtagatggtgacatgggtttgaactcctttagtaatgtcgcggctgaagctttcaggaatatagatgatgccatacactttgccgttcttcaataaagtttttgcttcttccatatcactgcaatgagatactatttccaagtcggcacctgcatctaccaggcgcaggtattcacggctgaggctggaacggttgttatctactacagcagcagggacttcacgcactgtttcattggtatatataaaggtatagagaagcggatagcctagtggtaccagaatgaagaagataagtacaccctgatcctttacaactgctttcaactcttgccaccagatgtagaaaaggtccttggttccttgtgagatgatatctttgagtttatatgttttcatacctgtttgccgttttagggaatatatacataatgtaatagtactgtgcgcagtcttttcagtataaagaaaggcaacagcatgaataacatcaacgcgactactgaatgccatgcgtaaatcagcggatatccgttaagtgccaaatctacataaatcaggaagtagtggcgtaacgggaatagattggccagtgcctgtaatacaggattcattgccataaccggaaaactcatacccgatatggagaaagaaatcaccccccatagggaggcggtgctcagtgccaagcggactgttgtaaacaatccgaacagaaatactccgaaagcctgtgaagccagtactagtaacagaccggcaaacagcatgggcagtataccgctattacagggatagtgcaggaaaccgtatagataaacattatagaaggtggccatgacaaagaaaactacagtctggggcagcaatttgccggtcagggctacggtgatggaattgtctgccatgtccatccattctttttgggtgttggttttcatttcacttccaatggtatagacggtggtcataaagatgagcagcatcaggatacccggtatgatggtgttactcaaatatacagagtaattgagccatgggttgtttaatacatgagagtcgatgactatgggctgcaggaatgccatggcctggtcttctgtagctcctttggcatataaggtggcacggccgatggctccacccgccagctcggacatggtgcgctggtctttatagagtaatgaacctgctaccagataggagtagttggtataaaaggaaaccttgggttgacggcttgctaatgccttctcggtagttccttttggaatatagtagaaagcatagatctttccttgctgcatggctttgcgggcatccgcgaaactggggtaatgtgctatgattttagtctgctgaaaagcgtccagattacggatgatgctgcgtgtggtagctgtgttgtccaaatcgaccacacctgccggcatatccgtagggagtccgttccacattaatgtagtgaagaagagataacagaacaagggagctatgatcatgcagaacagatatagcggtcttgtggcgatgcggaacacttcacgccgggctatgcggaatatacggttatggacagtattgttcattgtttgttatttctcgatgatggcactcattcccggacgcaatccgtctgttctctctacaggaacagctttcacctcgaaggtcttcaggtcgaattgtcccgtagtcttggttgctttccaggcagcatatgtacccagatctttcatataagtaaccttgaattttatttctttgtcaaaggcaggaataaatgcgctaatctcatttcctacggtaaagtcttttaggaaatcttcgcgtacattaaatgttacccacatgtcattcaagcgggccacgttcataatgggggcaccggtacctaccagttcgcctgctttgggaaaaatttcggtcacttctccatcagctgacgcggtcagtatcgtttcgtctatgtaggaggaaacttcggctacagcacctttggcacgttctacttgggctgcggctgctgctttgtcttcacgttgtgcaccgttctttgccatttcgtattgggagcgtgctgctttttctgtagcggtcatggcatcaaattgtgctttggcttcatcacgtttttgcgcggacattacgccttgttcaaagagccggttgacacggttgtatgacttttcagcaatttctactccggctttggctttctgccacatttcgtaggcagcttgcagttgctcttggcgggtacctcgttgtgctttttcattcaaggcttgtgctgcttgttcggcagcttgtgcttgagaaagtttggcttttacatcgggggcttcaaggatagccagtgtgtcaccggcttttactttgtctccttcctttacacgaaattccagaatgcgtcccggcactttgctggatacacggtattcgtcggcttctgcttgcccctgaatgatttccggacctttacccagtgtaaagaaacctatcagtgacactatgacaatgactgctgtcagtgaaataaatgccagcaaaatattgctgtgttgtgatctttctgccatatcttttcgtttttaatctttaatttttatttaagcactcccattgatttgcgcaaatagacttcagtcagttttacatcaatctgagcgtctattttgtccgactgggcagataaccaagcggtttgcgcttccaatacgttactggtaggaatgactccttccatgaatcccagtttggcatagcgcagattctcgtctgctttttccagatttttttcagccatactcaggcgtttggctgcttcatttactttatagctggcttggcttacctgcaattctaccttttcttttgcatctgccagttggtagcgggcaatgtttgcttccgctttggcagcttttaccttatacattccttcgccccagttccatattggaatttgtaccatagcgccaacagcccacatgccgcggaatttgcgttcaaagccgtttaccaatgagggattggttaccatgtagttggcggtcagagccactgtaggaagaaatcccgcgcgggtgatattgactttttggtcataaattttattagctagatccaaacttcgtaattcttcgcgatttgccaaagcggtggctacattatcacctacatgatattcaaggagagttaagctttctacgtcttcatctgctaaacgtatttcatcatttaaaggcagaccgcataattggcatagtaccattttagataggcttaatccgttgtctatttgtgtgagcttcatttcggcttcattcacttttacttttacacttagtccgtcggctttggtggcgacaccttcggttatcattttatctacatcactgtccagttggctgaccagttgcagatagctttgggctagttttttcttgtttatcagtgagatgacttgccagtaagcttggtctgtactcaaaatgatatcctgcataccggtggcgtgttgtgattcggccagttgttcagcgtatttggtgattttattgtaggcaacgatttttcctcccatgaagatgggttgggtaagggtcacagctcctgcatacatattgcgtgtgtcggtgcgcagcgcatctaccaaaccttgtcctaccttgttcagtgcatttccaatacctgggatgaggggagcaagtggttgcagtatttgtgcgagttcgggattggaagctgccagttgttggaaagtttcctgtatggagccttgggcggtagtccctatctgactgatagctcccttttgttcgtcacttaataaagagatttctttctgagtgtgcatataggttcctatagccgcaatcttaggaagataattggtaaaagccgctttcttttcataatgtgcagctgttatcttttcagctgaaatgcgcaactctttattgttggataatgctaaagcacgacaactatctaaggtgagtgtgctttgggctgaaatactatctaaaacaccgataaataggataaaagctgcaatctttttcattatagtgttcttgttttgttgtttttaagttgtttatgcaacaaaaataagacaaatcttcaagaaagccatattctggatgttattttaaaatatttttataattctgcaatctgtatgtttactgcttttgcttggtggagaaaaaaacagccggttcgtttccaaccggctgtttttttattaaatatattggaggggagaatgttccttgttatttcatgctgaaagcttgttgtcctatcatggttccatcagcgaaaatataaacatgataagttccggcaggcaaatattcctctacgtcccaatatacggttacattttgttcttctccggtgtattctatgtatttcttgatggaataaaccaaattacggttttcgtatgggaatgtgtttgaagcgtttttggttagtatgtcattgtctggtttggcaatacgtatatataaagtacgttcacctgttttggcggtaatattcttgacaatggtgaacgagatggctatctttttcacatcttttactttcttggctgttttaccacgtttatttctaggctctacgctaattcctgtggcatccaattgggctgccaaggtgaccttttcattcagattttttttctcttgcgataaattattgatttgacgggttgcctgcgtatatttttgttttacttcttggttttcttcagctagtgcttggttgagtttgttcagtgaatctatttggataacataggtgcgtagtacggcacgtactgttttcagttctttcttcaaacgcatgatctcagctgcgttactggtctttacttgtcgtaattcttctagcagccgctgtgttttcagcttctcactctccagcttttcgcgcaaggaatcattgtttatctgtatctgaagttcatcatattgggtggcgaaagtggtatattcgttttccatttccagtttttccacagcgaagagttcgctcatttccttattctcttttgcttgatgaaaagcataaaaagaaactccgccgataatcacaaccagcagaataatgacaataatcagttttttgctcttatccatagtgttacattgaattttggacaaaagtacaataatttatgtagactgctcgaaaaatattatggaaatttttctttaattcggaatatcattgtaactttgcggtgcttttaagaaggcgattttattatcaactttaaacaaaatatagagattatgtcaaaagtaaccgtagtaggcgcaggtaacgtaggtgctacatgtgcaaatgttcttgcttttaacgaagtagcagacgaagtagtaatgctggacgttaaagaaggcgtatcagaaggtaaggcaatggatatgatgcagacagctcagttgttgggcttcgacacaaacattgtaggttgcactaacgattatgaaaaaacagctaactctgacgttgtggttatcacttcaggtattccccgtaagccgggtatgacccgtgaagaactgatcggtgttaatgcaggcatcgttaagtcagttgctcagaatatcttaaagtactctcctaatgctatcatcgtagttatctctaacccgatggatactatgacttatttgtcattgaaagctttgggcttgcctaagaatagaatcatcggtatgggtggtgctttggatagctcacgtttcaaatatttcttgtctcaagccttgggttgcaacgctaatgaagtggaaggtatggttatcggtggtcacggtgatactactatgattcctttgactcgttttgctacttacaaaggtatgcctgtttctaacttcttgtctgaagaaaaattgcaggaagttgctgctgctactatggtaggcggtgctactctgactaagttgctgggtacttctgcatggtatgctccgggtgcagctggtgcatttgttgttgaatctatcatccacaaccagggtaagatggttccttgttcagtttatttggaaggtgaatacggtgaatcagatatttgctgtggtgtgcctgtaatcttgggtaagaacggtattgaaaagattgttgaattgcctttgaacgaagaagaaaaagctaaatttgctgcaagtgctgctgctgttcgcaagactaacgctgctttgcatgaagtaggtgctctttaataagaacaagctataattttatataaaaagccgttttttcagtgaaatgagaaagcggcttttaatttgtacagaatccctgaaaaagtaagttcacttactttttcagggattctgaaatgaaaacggcaggaagattttctcctccatcagtccatcgggtaaaggggtaaccgggataaagggtaggagctgtttcatctatccattggttgagaagccggtagatgggaatgtcttccttattcataaaagtacctgtgtattgggcatttttagacaactgattaccatcgtcattttttccgataaaggttatttttgcattatcatagtagttgtggataaagaaagagttggcagctatacctgcgaataatcctttggtcgtaattagatctatgttatagacataacaattttcaatgtgcgctccatccgaagctttcccgcatattccaccattgtaactctctctgttctttattatgttgttggcagaatagcagtttgctatcaaaccttgggcctggctggaacctgctattccaccggctggtcctgcttttatttttgaatttgcgtcataaatgatttgggtgttggtaacatagcaattggtgatttcccctgttgaagttcctgctatgcctcctgtattggctgattggttcgttttggttggattggctgcaatttggcactccttaacgcaacaatttagtattttgcctttattgcgtccgactaaaatacttgtaccttctgctgtgctcttgctttttgatgtgatagatactttgctggattctatatggagatttttaactatgccggtgatattgacggctccgaatacacctgtggtgccattgctggaattgataggtatattgtaaagggtgtgattttgtccgtcaaaggtttgggaaaagtaatagtttgtttgggcgtatcctatttgttttaactcagtacaatccacatctttaaaatcaatgtcattcaatagataataagtggttattccattcatcgtttctccgaaatcgtccaatgtttttcctttgtattgggtaaatgtattgctattgataagttgactgaatgcaatccaatcttcggcagtcataattcccggagttttttcagatatttttaagtgataagtatattctttgttaccggtaaaagactttgtttctagttgtgttgtatatttctttccatttgttaccatatttatggcgatgaccatgtttccgacaggagggactataaacgaataatttccggaaggagaaacttgggcaatagtagtcgtatgtgttccgttatccgctagaactatttcagcggattttgggataatagaggaaacagcaggacatgttacctctattttctgaaaataggtttgtaaatttccctccaaatgcagtgtcagaagagaaaataaatgtttgaactgtaaatggatggaatttccggccggaaattcatccttgacatacagtatgtcttccaacgaattgtttttataaagattttcttggacatagtccaaatcgggatagacaggatatactgccgtaacatttgtttttcctgttaggtcactccagctaaattcattttctgctttccattggttgtccatataagtcagaattctgttgtctatctgaagactgccggaagcattcagcaggatttgattgccggagttaaaagtggaaacaggggagctttctgtgaaagctgcttggtatgtattgcctgtgagtactacctcgatatcggtccctgtataaacaagattgtcggtgcagctttgcaaagccaggaccgacaatcctattattaatgagttatatttcaactgaataatgtattaatgaaaattgctttatggttcaggtattgtgaattccctgtcagcaaagagttccattaggccggatatctgtttgagtcgtaaaagttcgtcggcatccatgccaatattcttttttatccattcgtcactcattccggctttggtcagttctgccacgatatctaccatcagttcaatgctgtgagtgccgcgggcgcggttgtggcggatagtgcttgccattctgtttgaaaggtctttttctataacgaccacgggaagtaaacctttttctcgttcaaacacacgttttgaagttttaagcacacaataacgatgatatccgtctaccagttcatatatatcttcatcgggaatataataacatacacaaggcatagtatagccatcttcccaaatgcttaattccagcaatttcatttcaggagcggctacgtggtttggattataactgttggcacgtaccttttccaccggtactctgtgcacgtgatacacaggactttcgaattcttctttcatttgataatgtttttatatttctgcatcactctgtctcttcttaacttttcttttttagttagggcaaatcccatatatttacatacatggtcatttttcagaatgcaaatacacatacgtttataagtggggatttctttaaactctgcgatgtctatatcgtctagataatccatttggacaggaagtttgtctgtcttgtagtttgttttcttttgtacgtagaattttatgcccaaatcagttaatttacgtatggttgataaatccaggcatcctcccttgtatttccagaactcccggcttactcttagtttttccaagtaagactgtttggtttcttcgggtaacgtatctaacaggaaatacatatactctttccatgtgtagccttctggtaatttgatgttttgccatcccatggcacgggttccaccatagattccggtaaagtttactccgtttactcggcctaacattctcccccaagtattaggatcgatggctttgtataatttcaaggtttcctgtgctgtgctgaggaacggactggctacacgttgtctgtccaaaggtactccggctttataataaagttcgtacatttggttgaatggccatttgaaacgggcgtatgctgtccatatatcttcggtagtccagtcatagatagggtaggcattgtataaatcgtatcctagtctgcgggtccacatcaggttgtgatagctgttcaggcgattgttaccgtgaatagttctccatcggtccaggctctcttgagttcggatgccgaccaggcagcaagtgcgtactgcatcatgctttttatggtaccacgatgcaaatgaagtctggaaagtgtagtcccacatttcctcattgtagaatgggaaatcttctttcttataacagtttttaggcataggccttacccagtgggcgtgcatactttcgtcccaagggcgccaataggtttgaaacatagaagcacaagtcactactttgaaaggaacacagacatggtagatttccaatatatcctgattttctctgaacgtctgttccacatattctgtagtcatttgatactgtgcttcatagtccatgtggtatactccgattttcctgtccagattatgctctctgatatattgaatacataagttgagcaagacaccgctatcttttcctccagaaaaagaaacatagatattatcaaattcgttgaataagaatttgagtctcttttgaacgagttgataaacattttcccctttagttcttttattattcatttttgttcgtgttgtaaatcattttaatataattagtccaacggtgttcggtttgaaaaccacagttggaaaaaatagcttcgtgtttggtttgaacaattgcatataaattgtttttaggctttactgctcccaacaattcaaccagcacttcctgatcatcgttatggacatagtagttgttaatgacataaccgccacttttctgctctacagggacaaaaccggttacgtcattatcttcgacggcaatgtaccattgaaaacgttcggtcgttttgaagggataattgttattagcccttaggactttaggattcatagccaatggtccaattaaattaaataattgaggttcaaggccatctagttgtaatatttccataacttaatttttacatacgtttacttgaagctacaaatgtataaaaaagattggatataccataaaaaaacgctgccataccttcacaggcgggcagcgcaagctacaatacaaaatacaaatacaactaaacgagatatttttatgctaatagaatgcctttaaacaattccttgagccatcatggcatgggctactttcataaagcctgcaatatttgctcctttcacatagttgatatatccatcaggttcagtaccatatttcacacattgttcatgaataccatacataatttgatgtaacttatcatctacttcttgtgcactccaactcatatgcattgcattttggctcatttccaaacctgaagtagctacacctccggcatttacggctttacccggtgcatacattagtttattttcaataaacgcatcaattgcttccggggtacaacccatattagaaatttctccaatgcaaagaacggaattttttattaaattacaagcatcttcgccatttaattcgttttgagtcgcacacggaagcgcaatatctactttaacttcccacggacgacgtccggcaacgaatgttgagttaggatatttctctgcgtatggagctacgatatcattgcctgacgcacgtaattccaacatgtaatcaattttatcaccacttacaccgtccggatcatagatatagccgtcgggtccggagattgtgactacttttgcacctaattcagttgctttagtcacggccccccaagctacattaccgaaaccggaaacagctaccgttttgcctttaatatcaattccttttgctttcagcatttggtttacgaagtaaagaccaccaaaaccggttgcttcaggacgaatcaacgaacctccaaattccaagcctttgccagtgaaggtacctgtaaattcacgggttaactttttatacataccgaacatgtatcctacttcacggccacctacaccgatgtcaccggcaggaacatccatatcaggacctacgtggcgccacaattcaagcatgaatgcttggcagaaacgcatgatctcagcatcgctcttaccacgtggtgagaaatcggaaccacctttaccaccgcccataggcaatgtggtcagtgcatttttgaatgtttgctcaaatcctaagaatttcaaaatggagaggtttacagaagcatgaaaacggataccgcctttgtacgggccgatcgcattattgaattgaacgcggtaacctaagtttacctgtacttttcctttatcatctacccaaggcaccttaaatgtaaagatacggtcgggctctaccaatctctcaatcaaggacgctttctcaaattccggatgttgattgtatatatcctcaatagaaagcaggacttcttttacagcctgcaagtactctgattcaccagggtgttttgcctccagggaggtcatgatttgattaatatccataactattatgcatttaaggttttgacaaaatgaaaatcatttctgatgcaaaggtatgttttttggtgaattggcaaaatatttttggctaaattttagtttggtggtgataaaaagttaatcgttgtggtaagacctctctacccaaaagttcttttttattgcgaataagttgcataaaacaatattattgacgtattttgctattacattatccatgtaaatcaaataaccatgctcagcaagttaaaattaaatcagttgtatttcaaggatacctcgtttgtaaacctcatgaccaaacggatttttaatgttcttttggtagcaaatccgtatgatgcttttatgttggaggatgacgggcgtatagatgagaagatatttaatgaatatatgaacctcagtcttcgctatccgccacgtttcacacaagtttctactgaggaagctgcctggaagcaattggagaacactacatttgatctggtgatttgtatgcccggatctgataacagtgatacatttgagattgcacgcagcataaaagaacaataccctcatattccgctggtagtactgaccccgttctcgcatggtattacggcacgtatggagcatgaggatctgagcatctttgaatatgtgttctgctggttggggaatacggacctgttagtgtctatcatcaagctgatagaagataagatgaatttggaacatgatattaaagaggtaggagtgcagatgattttattggtggaagattccatccggttctattcttccgtgttgcctaacttatataaatttgtgttgaagcaaagtcaggaatttgccacagaggctttgaatgctcaccagcgtacattgcgtatgaggggacgtcccaaaattgtattggcacgtacttacgaggaggcgatggatttatataataaatatcagaataatgtattaggtgtgattacggatgcacgttacccgcgtggtggtgtggtggatccaatggcaggtattaagttgctggcggaggtacgttccagggatccgtttgttcctcttattttacagtcggccgaggtagacaacaaggtgtatgcttcccggtatggtgctagctttgtggataagaattccaagaagatgaatatagacttgcgtgaaattgtgtctgatgattttggtttcggggatttcattttccgtaatcccgatacattggaagaagtggcccgtgttcataatttgaaggaattacagaatgttatttttgctattcctaaagaatctctcctttaccatatcagtcgtaatcacgtatcccgctggctgtattctcgtgccatgtttccacctgccgagttcttaaagcagataacttgggagtctttgcaggatattgatgctcatcgccgtataatctttgaggctattgtgaagtaccgtaagatgaagaatcaaggtgtggtggctgtgttccaacgtgatcgttttgaccgttattctaattttgcccgtatcggtgaggggtcattggggggaaaaggacgtggtctggcttttatagacaatatggtaaagcgccacgtggaatttgatgagtttgaaaatgcgacggtggtcattcctaaaacggtggtgctttgtacggatatctttgatgaattcatggataccaatagcctatatcaagtagcattgagtgatgcggatgatgacacgatattgaaagcttttcttcgtgccaagttgcccgaccgtctggtggaagatttctttgctttctttgatgtggtgaaatcgcctatagccatccgttcttccagtttgctggaagattctcattatcagccttttgctgggatatattctacttatatgattccttatttagatgataaatatgagatgctccgtatgttgagcgatgccataaaaggggtgtatgcttctgtttttttcagagacagcaaggcgtatatgcaggcaaccagcaatgtgatagaccaggagaagatggctgttattttacaacaggtggtcggcacacagtatggtgaccgtttctatccttctatttcgggggtggcacgttcgctcaactattaccccataggagatgaaaaagccgaagagggaactgtaagtcttgctttggggttgggtaaatatattgtagacggaggtctgactctgagggtgtgtccttatcatcctaaccaagtgttgcagaccagtgagatggaaattgctcttcgtgaaacgcagactcagttttatgcgcttgatttgaagaatacggggcataacttttctttggatgacggctttaatttgttgaagcttccggtgaaagaagctgataatgatggagccttaactttcattgcttccacgtatgatccgtatgatatgattatccgtgacggaatttatccgggaggccggaaggtgataacatttgccaatgtgttgcaacacgatgtatttcctttgccccgtattttgcagttggtacaggaatacgggcaaagtgagatgaggcgtcctgttgagatagagtttgctgtgacattgaaccagcaaaagaagaatggtactttctatttattgcagattcgtccgatggtcgatgtgaaagccaatcttgaggaggatttgaaccttattaaggatgaggatgttcttttaaagagtaataattcactggggcatggcattatggaggacattcaggatgtgatttatgtgaagacagatggttatactgcttccaataatccgaccattgcttatgaaatagaaaagatgaaccgtaaattcttggatgaagggaaacattatatattggtaggtccgggacgctggggaagcagcgattcgtggctgggcattcctgtgaagtggccccatatttcggctgcacgtgtcattgtggaggcggggctgactaattatcgtgtggaccctagtcagggaactcacttctttcagaatctgacttctttcggagtcggttatttcacaattaatgcctatatgaaggatggtatctataaccaagaggtactggatacccggccggctattgaagaaaccaggttcattcgtcatgtgcggtttgataaaccattgatagtgaagatggatggaaagaagaagctgggggtagtgatgttgccggaataatgttctaaattacgtaaaatgtgtcctaaatttcgataaaaatagttatacgcttaactttttattatatttgcacgatttttcgagtataaattaaattaactaaacaatgaaaaagaatcttttttattatttgttcgcagtgatttgttctgtgacattgttcacatcgtgtagtgatgatgatgatgaaaaaatggtaaatcctgtgcctcagacaacctttactggtgaaaatggtttgcaacttacatacaatggtgcgccgatgccgggtaagaaagttacttttactcccgatgcaaccaatgctcagaaggcaactttacgtttggaaggggaatttgacttaaatggcatcttggggaaagcaaagagtgctgcagctcgtgaagatgtatcgatgcctactgctcccggtgtgttaccaggaagtccggtggttaccttgccggttgatttgactatcaatggtgatcaatgttcttttgccggtacatcagaaacagattattgtactttctcttataaaggtgaggtttcagccggagctatggagctggctttgagtgaagtgaaattgaagaatgcgaaactggctggaatgacttggaagttgaaaccgtataaccaggaagtagaagagcaggatcctgttcgtctggtatgggagtcagaaaaaggaattcctcttttcggttcttttgaaatgccggttgagtcggttttgaaaatcgcattacgcatgccgttgattgctgttggagcagaaaataaagtttccgctactgatatgttgggaacagttttgaaggatgtcactttcatggaagacggtaacatcgtggctacttataaagatgctgctaatggtggtacagaatggacgaagtctcctgtaaacttggctcaatacgtagtagagaatgacaatcagataaaggtgtttctgaatcctgctgctatcatcgctgctgtcaataatgcagggagagctattgatgttcagacagttatccagcaggccattcaaatattgtatcctatgttagtgaatggtgtgcctgtagcttttgaacaaacagaggatgctttaagcgtatatctgaatacagaattactgttgcctttattgaaaacactggttgttcctttgttgtcagacgaagaagtggttgctatgctggtggaattgatgaaaaaagaccctgatttcggtgaaatggctggtttagctgagccaatgttgaaagcttttcctgagattatagaatctactactaaagtggagattggtttgaactttgttaagtaaagaagaaaagctgaaattatttgtatagtaataaggcgaagagagctacctctcttcgccttatttcatagttacttttatttttgtatttcaccttcgattacttgagcaaagttttttaattttccactacaactaggatcacctgtaaaaatatgagaagtgtaatggaacattgtttttctcatatcagaaaatggatttttgtacgtatatctgcatagaattatatagacgtatgtgaaatcttatatgtttcaaataaaattctacatcaaagataaggacgttttttaaaaagatcaagagcttttaaaaaaagacaaagagcttttttaaaaacgtcttgatcttttttactactactgggactttgtaagctgtcattctgtggaagtacaaagcctttatacgtattattgcgaggaaaaatcctgaaaatatctactttgtattaagccgaaacaacttatgaaaaagaatatatagctgaaaacaagtagattacgagaatatctgtttcggaacgtaatgagggcatgagagtataagtgagagcatatattattagcatttatgtataagtcatttataattaacatattatacatgtagtgagagcatgagggtataaacgtccccaactttctagagaaaaaactaatatgtcaagaacacttctaaaagttgccggagaacagaatgatcctttaagagtaaaaatctttcctcatgattttgtagataaaccactactctcccttatcctacttcagaaatgtattgtttatcggaaaattgaagtaggataagggggagtagaacaacaaatagtcagtggtggaaaacttttggattagaacgcatacccgaatcctacattcaggtagatggcatacatatcaaaagtaacggtcttgaaatctttgttgaatatatcattcaggccccaattcaagtcggcatgtactttcagatgcttgaacgctttccaatccacacctgcttgaactccccattggaacttgcgtagatcaccggagaagtcgtaagtagcaatggctccgttggtgaaatttattttgtctccggtggggttggtttcacgcaaatagccttcatatacatggccactgaaatctccatccatcagataagaaaagtacgggccgagtttcagcgtggtgcgtggactcagtttgtaggctgctagtacggggatggtgatgtaagagttctgtactttggtgcgtactcctccagtccagtttccttttagtcggtttccgtcatagcctatgatttccatattgtaattctttaccgttgctttggtgcgcatgcctttattctccaaacgcagtccagtgatgattccccatttttttttcgtatccagccacttggtcatgtttccctcgatagtgatagatagggttgggttatatccgtctatgctgcgtatttcttcggggaaaggcagtggggcggtacctcctaggttgactcccgctttgatttcgtactcccaaccatgcaatgctgcattgatgattgttttgtttctgtttgtctgcgcatacagtccgaggcttgctaaagccagtatcaaggttaatatgtattttttcatatctgtttttatctaagtggttgtttgcataccagttccaggtcgtcaataagcagggtgctacccggtgcgccttgaaatacatcaccgtccttgcttgccgataggacaatgctgacgttgtatcctccgtttgccaatttttggggatctattgttttcccataatgctcatagttgaagtccagttcaaagcgggtccattcgcttgtttcatgcgtgtcggttatgacagcagcggctaccatgttttcatgttcataattgttctttgcgatatggccatccagcatctgcacgtctttggtcttttcgtaaaacaaggcatagatattgaaaacgtcttttcggttggtagattctccgttctcatagaattctggtcctgctttgtatttgtagtagccgaccaatttaatgggttcataatagaaggttgttccgaatttggttgccgacaacgcatcgctcatggcggagcctatgtcgaaactgccaatgaacaggttacctgctgcaatgggcatacctaccaaagtgcctaaacttcctgttttgcgagtaatcagttgcaagcagttgcctgtgcggccgtttggactgatgctggtagggaagtcgttcggagtgtaaccgcttccggttaaggcaaatccctgattaccactggaccatgttagtgtggagtagccagaggctgcttcgtatagcacataatattcatttttattgtaaggtacggtttttacgttttcaaagttaaaaaccgtcgggatgcttttggtttctggataatggatattgatggcgtaggtgcggtgccaattcttgtcctcggatgttacggtatagcgcactgggttggtgaaattctgtgtacttccgttggccggttcgatagatgctccttcagtcagctcgaaagtgggagctagtcgggtcaggtcggtaccgttgtttacttctatgtaaatagggtaagcgttcaggcttttgtcgtaaggacggttatagtcaatgtctgtacctgtcagcatctcggcagggaggatgcagttcaagatgtccgcttccgcattgggggcttcgtccttgatacaggaggtgcaaaggagcaatcctgttactgtgcaggtgaataagtttttcagcttcatgaatttgtaatttaatagttgttcttatacataacagattgcaaaggtactgattttccgtgaaagtgtttgcattcaaaatagaaaggtgcggaaaattgtctttcccgcaccttgaactgcaaatatacttaataataaaggaatggtttttattaaacaataccttgagccatcatagctttggctaccttcatgaatcctgctacattagcacctttcacatagtttacataaccatcggcttcagtaccgtattgtacacaagcctcatgaatatttttcatgatacttttcaatttttcgtctacttcttcttgactccagcccagtttgatagaattttgagtcatttccaatccagatacagatacgccgcctgcattggctgctttgcccggggcatacaggattttggcttcttggaatacgcggatagcttcaggggtagaaggcatgtttgcaccttcgctgacagctatgacaccattggcaaccaattgtttggcttcatcaccgttcaattcgttctgagtggcagagggtaatgcgatatcacctttctcaccccaaggacgagcacctgctacatatttgcagccatatttttctgcatattcacggatacgtccacggtataaatttttcagttccatgatgaaatccaatttttcacggtctattccatccggatcatagatgtaaccatctgaatcggacatggtaactactttaccacccaactcgattactttttctaccgtgtattgagctacgttacctgaacctgaaaccaaacaagtttttcccttcaggtctgtgcctttggttttcagcatttccatcaagaaatagatgttaccatatccggttgcttcagggcgaatcagagaaccaccgaattcgcggcccttaccggtcagtacaccggagaattcatgagagagttttttgtacatgccgaacatgaaacctacttcacggccacctacaccgatatcacctgcaggtacgtcagtctcaggaccgatatggcgccataattccaacatgaatgcctggcagaaacgcattacttcggcgtttgatttgccacgcggagagaagtcggaacctcctttgccaccacccatcggaagagtagttagtgaatttttgaatgtctgctcgaaggcaaggaatttcaaaattcccaagtttacagaagagtgaaaacggataccacctttgtaaggaccaatggcattattatgttgtacgcggtaacccatatttgtctggatgttacctttgtcatccatccacgttacacggaattgatacacacgatcaggaatacacaaacgttcaatcaggttcaccttgtcaaattcgggatgtttgttgtattcttcttcgattgtacttagcacttcctctaccgcttgatgatattcaggctcattggggaatcttcttttcaaatcttctaataccttagctgcattcataatctacttctttttataattgttaattaattcttcttgtttcttttgatggtgcaaaaatatagataagaattgaaatatgcaacaaattataaagaaaatgcgtgtaaaaatatcaatatgtacaaaatgtaagctaaaaagcggataaaagattattttcctctttccttgagatattttaatagtggaataaagactaaagctcccgaaatgataatggatagtattaaaggaccgtcaatatgttcgctccctgttagaataatatagcaaatggcaatccataaaagggctaaggttacgatttgtgggagggaaagcggttttcttctcatagtattgttttaatgagttgaatatatttcaccacaaatagccttgatttacacagatagaatttgctggtactaacaagcatgattaataatctgtgtaaatctatgcaatctgtggtgaaagttatttatttttctttctttttcttgtcaacgatggcatcaataaccgcaaccgcagtgatgtttacaatatcgcgtacagaagcttcacaatcagtgaaatgaataggtttgttcaatcccatttgtatcgggccgattacctcggtttcactcatagactgaatgagctggtaagtagcattggcagaacttaggttcgggaatactaacgtgtttacttctttacctttcaaacgtgtgaagggatatttctcatcacgtaatttagtgttcagtgcaaaattgacttgcatttcaccatctatagccagttccggatattctttctgcatatagtccaccgcatcatgtactttagccgggcttccttctgtatctgaaccgaagttggagtaagacagcatggccattgtcggagtgtgattaaagaactctaccgttttcttcgacaatttagcgatgtcaatcagtgtgtcggtgtccgggtgacggttaatcagggtatcggctacaaaataagtacctttctttgaattcaagatatgcattgtaccgaaatgtttgtattccggttggataccgataacttctttcgctaccttgattgtgttggaatatttggtatatagaccggtgatgaatgcatcggcctctccggtttcaaccatcatcataccaaaatagttgcgctcgaacattttgtcgttggattcctgaaggttggctccttggcgtgcgcgtttttccgaaaggatgcgggcataacgctcacgacgttcagcttcacggtcatgacggaggttgatgatttcaattccttccaagctcagatccagttcttttgccagtttttcaatgcgttcgtcattacctaataggataggatgacagataccttcggctttggcttctacggcagcttttaacatggtaggatggataccttcggcaaataccacccgctgtgggtcgcgacgggctgtttcgtaaagttgacgggtcaatttgctttcttgtcccatcaattcgcgcagccgggtcttgtaggcttcccagtcggtgatgtttttgcgtgccactcctgattccattgctgcttttgccacagccatggaaacttcggtaatcaaacgagggtcaaccggtttcggaatgaaataatcaggaccgaaagtaaaattattcacatgataggcttcgttcactacgtcgggaacaggttgttttgccaaatcggcgatagcatgcacggcagccagcttcatttcttcattgatagctttggcctgagtatccagagctccgcggaaaatataagggaaaccgattacattattgatctggttaggatagtctgaacgtccggtagacatcagtacatcggggcgggatgccatggcgtcttcgtaagagatttccggagtcggattggctaatgcgaatacgataggatgatctgccatactgcggaccatatcctgagtcagcacattaccttttgatagtcctaaaaatacgtctgcacctttaatggcttcttccagtgtatgtacgtcgcgacggtcagtagcaaaaaatttcttactttctgtcaagttaggacggtcactggttatcacgcctttgctgtctagcattaaaatgttttctttccgtgctcctaatgctacatacagttttgtacaggaagtggcggaggctccggcaccgtttactacgattcttacattttcaattttctttccggcaacttccaatgcatttaataagccggcggatgaaatgatggctgtaccgtgttggtcgtcatgcattactgggatatccagttcttctttcagccggttttctatctcgaaacattcgggagccttgatgtcttccaggttgatacctccgaaagtgggagcgatggcttttactgcctgaataaatttttcggggtctttctcattcacttcaatgtcaaaaacatcaatacctgcatagattttgaaaagtaatcctttaccttccatgacaggttttccgctcaatgcacctatgtcgcctagtcctagaacggctgtaccattggaaataacggctactaagttgcctttcgcagtatagtcgtatgcagtttgcgggtctttctctatttccagacaaggctcagctactccgggagagtaagccagtgacaggtctgtttgtgtgctgtacggttttgtcggtacaacttcaatttttccgggcttgccttgcgagtggtatagcaaagcagtttctttggtaatcttgaccataatctttttccttataattagatatcgttttaaattggtggcaaaaatataaataaaattataatttgaagcctaaatactgtaaaatgatgtcgaattgatgattttttaagtgttgattttgaccaatgtgaaaatcagatttcattctttcgtattttgctggacaaagatagcgaaaaaatagtttcattcatgtccgtatcatgtatgagttgtaatatggtttgcttgtttagatctggaaacagattgaatatatatggaatatattttacatagttaatatccttctatatgcgcacgttatttatagttaaagctaatgggctaagcgaacaaatgccggaaaaatgactaattttgcggcagtaaaaactaattgggtttaaaaagttttctataaacatctgttaattcgacaaataagtaaagttcaataatattagttatgaaaatgacagtaaatagtatgaaatgtatttcatggagccgcctcgcgatatttacggcggcaatgaccgttttaagcagttgtggaggcggtcagagcggtatgaagttgggtgatgacgaatttaccgtcgtggctgtacagtctacagccagccagcagtctacttcttatcccgcaactatcaaaggtgttcaggatatcgaggtgcgtcctcaggtttccggctttatcgtaaagctttgtgtggacgaaggtgcaacggtaaagaaaggccaggcgctctttcagatcgatcctacacagtatgcggctgccgaacgtcaggcaaaagctgctgtagagatggcaaaatcgaatgtcaatacgctatctttgaacgaacaacagaagaaaaatttgtatgataagaaaattatcagcgattttgagtatcaaagcgcagtagaccaattgctttctgcaaaagccagtttggcacaggctgaggctcagttgaccagcgctcgtcagaatttgggcttctgcacagtgaccagcccttcagatggagtggtgggtacattcccgtatcgtattggtagtttggtgagcccttcggtaacacaaccgttgactaccgtgagtgaaatcggtgaaatgtatgtgtatttctctatgactgaaaagcagttgttgggtttgacaagagccggtggcacactgaaagaacaactggagaagatgccggctgtaaaattggaattggctgacggtacaatgtatactgaagaaggtaagattgacgctgtaagtggtgttattgaccagactaccggttcggtaagtatgcgtgccgttttcccgaacaaacagcttgtattgcgtagtggtggtatggctaatgtaattttcccttatactatggaggatattattttgattcctcagtcggctacacaggaaattcaggataaaaagtttgtttatgtgcttcagtcggataatacattgaagcatactgagatcaaagtgtcgaatttgagtgacggtaagaattatattgttaccagtggtttgaagcccggcgataaaattgtagttgaaggtgtacagacgttgaaggacggacagacaattactccgattactccggaacagaaagaggcgaaatatcaacaacacctgaaagaccagaaggaagggaatattgccacggcctttaaataatcagtataaaataaacagattaacttcgtttatataaataaggtatatagagaatgaaactagatagatttattaaccgtccggtgctatcaacggtaatctccgtcttgatagttattctgggtatcatcggacttgctacattgccggttacgcaatatccggatattgcacctcctacggtgcaggtacgtgccacctataccggtgcgaactccacagctgtattgaattcggtcatcgcgccgttggaagaccagataaacggtgtggagaacatgatgtatatccagtcatcagcatccaataacggtgctgccgatattaacgtttactttaatcagggaacagatccggatatggcggctgttaatgtgcagaaccgtgtttctatggcacaaggattgctgcctgctgaagtaaccaaggtgggtgtgactactcagaaacgccagaactccatgttgatggtcttttcattgtatgatgaaaccgactcgtataatattgagttcattgaaaactatgctaatattaacttgattcctgaaatcaagcgtgtaaagggggtaggtgatgctaatgtgttgggacaggattattctatgcgtatctggttgaaaccggatgtgatggcgcagtacaaactggttcctactgatgtttcggcagcattggccgaacagaatattgaggcggctccgggacagttcggtgaacgtggtaatcagactttccaatacacgatccgttataaaggacgtttgcagcaaacgactgaatttgaagatattgttatcaaggccttgccggatggtaatgtacttcgtttgggagatgtggccgatatagaattaggtcgtctggcttatacattcaataatatggtaaatggtcacaaggctgtatcttgtatcgtctatcagatggcaggttctaatgctaccgaaactatttccgatttggagaaagtgcttgcaaaggcacaggaatcactgccgacaggtttgaatatcaatatcgcccaaaatgccaatgacttcttgttcgcttctatccatgaagtaatcaagacgttgatagaggcatttatcttggtgtttattgtggtatatatcttcttgcaggatatgcgttcaacgctgattccggctattgccattccggtggcgttggtggctactttctttgtactgaaactgattggtttcagtgtgaacctgctgactctttcggcgatggtgcttgccattgcgattgtggtcgatgatgccattgtcgtcgtcgagggggttcatgccaagttggatcagggatacaagtcttcccgtgaggcttctattgatgccatgagtgaactgggtggagctatcgtttctattacgttagtcatgatgtctgtgtttattccggtaagtttcatgggaggtactgccggtacattctaccgtcagtttggtatcaccatggcgatctctatcggtttttcagctttgaatgcattgactttgtcaccggcactgtgcgcaattttcttgaaaccgcatgatgagggacatggagcaaagaagatgacccgtgtagaacgtttccatacagcctttaatgcggcttatgattctatattgaagaagtacaagaagcatgtagtattctttatccataagaaatggttgtcattcgggctggttgccgcttctatcattttgttggtattctttatgaaggttactccgacgggtatggtgcccaatgaagataccggtaccattatgggtgcggtgacactgcctcccggtacttcacaggaacgtgcaatggaaatcttaaaccgtgtagacagcttggtggctgccgaaccggctgtagattcccgtacggtgatttccggtttcggctttattggtggtcagggaccttcttacggttctatcattattaagctgaaagattgggaagaacgctccatgatgcagaattcggatattgtggtaggtacgttgtttatgcgtgcgcagaagatcatcaaggatgcgcaggtattgttctttgctcctcctatgattccgggttattcggcatccagtgatatcgagttgaatatgcaggataagaccggtggagacttgaatcatttttatgatgtagttttggactatatggatgcgttgaaggcacgccctgaaattaattcggcccagactaccttcaatccgagtttcccccaatatatgttggatattgatgctgctgcttgtaagaaggcaggaatcagtcctagtgatattctgactaccatgcagggatatttcggtggtttgtatgcttctaacttcaaccgtttcggtaagatgtatcgtgttatgattcaggcggaacccgaagcgaccaagaatctggaatccttgaatagtatcaagatacgtaatgggaatgagatggctcctatttcccagttcgtttctgtcaagaaagtatatggaccggatgttatcggccgtttcaacctttatacgtctatcaaagtgatggtggctcctgccagtggctatacttccggacaggctttgcaggctattgcggaagttgctaaagagaatttgcctaccggttacggttatgagttgggaggtatggctcgtgaagaggcatctaccagtggcagttccacaggtatcatcttcattctgtgttttgtattcgtttatttgttgctgagtgcacagtatgaaagttacattctgccgttgtccgtattgctttcagtaccgttcggtctgttgggtagcttcctgtttgtaaacggatttgcagcattgggaaatattccggctttgaagatgattttaggaaccatgtcaaatgatatttatatgcagattgcattgatcatgttgatgggattgttggcgaagaatgccattctgattgtagagtttgctttggatcgccgtaagcagggaatgagtatttcctgggctgcggttttgggtgcggcagcccgtttgcgaccgatcttaatgacctcattggccatgattgtaggtttgattccgttgatgttggctatgggagttggtgctcatggtaaccgtactttgggagcttcggctattggtggtatgttgattggtatgatcttccagatctttatcgtacccgtattgtttgtggtattccaatggttacaagagaaattcaaaccgattgaatgggaaagtgtggacaatacagaggttgaacccgaaattgaacaatacacccgtaaatgaacagaagaacaatgaaaaagataataggattatgttgcgcgacgtttttattaagcggttgccacatctataaatcatacgatcgtcccgagtcgatagatgccactggcatctatcgtgacccggttgccgccaacgatacattggctgctaacgatacaaccaatatgggtaacttgtcatggaaggaaattttccgtgatccgaaattgcagatgctgattgaagagggattggcaaacaatgtagatatgcaggctgctatcctgcgtgtaaaggaggccaaggcgttattgacatcagctcgtttgtcttatctcccttctttggcccttgctccacaaggttcgttgactagtgtggacaaaagtactcctgtaaagaactatactttacctgcttctgcaagctgggaagttgatttgttcggcaaattgctgaatgcccatcgtggccagaaagcttcttatttgcaaagtaaggcctatcagcaggcagtgcgttcacagttgattggtggtatagccaatgcttattattctttattgatgctagaccgtcaagtcagtgtgaccgaacagaatgtggcgttaatgaaagaaacagtgcgcactatggaagctatgaaggaagccggtatgactaccgaagctgctgtggcacagagtaaaggggcttatcaccagacggaggcttcattggctgacttgaaacgccaggtgcgtgaaactgagaattctatctccgtattgttggcaaaggctcctcagaacatagaccgtggaacattggaggaacaagtgatgccggctgatttggcggtgggagttcctttacagttgcttgagaaccggcccgatgtaaaagcggcagaattggcattagccgatgcttattatactaccaatcaggcgcgttccgctttttatcccagtgttaatattacaggtactctgggatggactaatggttccaatggtacagtgatttctaatcctgccgttatgctttggaatgctatcggctcattgacgcaacccattttccagcgtggaaaattgattgccaacttgaaagtatcgaaagcggaagaacagattgccaagatgaattatcagcagactattctggaagctggtaaggaagtaagtgatgctttgttcctgtatgatacggcagacaaaaagttgagcgagcaccaggcacaggtttctgaaatgcaaaaagcggtggagatgaacaatgatttgtttcaggcgggaaaggccacttatctggaaatcattactgcacaacagtcattgctgagtgcccagttgaacgaagtatccgatactttccagcgtatgcaggctgttatcaatctgtacagcgcattgggcggtggacgtgaataattaaccttaaaaataatatgaatatgattagtccgttagcttatgtagacccgtctgcaaaaatcgggaaaaacgtaactattcacccgtttgcctacattgataagaatgtggagataggtgatgataatgtaattatgcccaacgccagcattatgagcggcgcacgcatcggtaacggaaataccatttataacggagctgtaattgctgctactccgcaagattttaaatatacgggtgatgataccattgcccgtataggtaataataataccatccgtgagaatgcggttattattcgtgccactttcgccggagatgagactgtggtaggaagcggtaactttattatgcagggagcacgtatctcacatgatgtgaccatcggtaataactgtattattggtaacggttcgcaggtgtcaggttgttgtgtagtcgaggattatgctattcttacttccaatgtactgatgcagggaaagactcgtttggggacttatgccgccgtacagggcgggtgtcgttttaccaaggatattcctccttattgtgtggcagcccatgagcctacggctttttacagcatcaataccaccgtgttgcaacatgaaggtttttcggaaacggttattaaacatatagcgcatgctttccgtatattgtataaagtgaatacatctacagaggatgcattgcgtcgtattgaagaacaggttccgtctagtcctgaaattgtacatctgatagagtttgtcagaagttctaagttgggtattataaaataaatgtatctttgtctccctttatgttaagaatgaatagcgtcaggaaaaaaagaacggataaaacggtagtgaaggaacacattgttttggcagcagcgaaatcatttgcccagaaaggtgtcaaaacagtgagaatggatgatattgctgccggattatctatatctaaacgtacgctttatgaattgtttcatgacaaagaggatttattacttgatgtcatgaagttacatcgggaggagatgcaggaatatatgactcaagtggcttccaaagcagaaaatgttttggaagtcctcttgaagttttttcaaagaagtgcccaggattttcagaatacaaacaggaaattctttgaggatattgagaaatatcccaaggtaatgcgttacattgacgaaagccggaaggagaatttggattcggctatggaattttatcgcaaaggagtggaacaaggcatttttagaaatgatgtaaattataatattgtacgcgctatggtatgtgagcagatggatttgttgttgcattcggaaatatgcaagtcctattcgcttggtgaaatttatgaaacagttgtatttatgcatatgcgtggcatttccactgaaaaggggttgaagattgtggataattttttattgaatttaaaaggaaacgaacataataagtatggttagaaattaaataagtcactaaataaagaataatagttaatgaaattttattgcaaacctacgttaaccttgtttttgctgctttatgtagcaatacaaagtgcacaagcacaagacacattgaggattaccttacaggacgcagtccggatagcattgagcgacaatcccaccattaaagtcgccggtcaggaaatcctgttaaagaaagaagcccgccgggaagcttatgccggtcttttcccagaagccagtttggtgggcagttattcacgagccataaaaaaacagtcattcgccatgatgggagaggtgattgaagtcggtacagataatacttatagtggtggtctgtctgtcagtctgcctgtctttgctccggctctttacaaaagtatcagtttgacaagtacagatgtgaacctggcggtagagaaatcacgtgcttcacgtctggatatggtaaatcaagtgaccaaggcattttttcagttgcttttggcacaggacagttatgaagtgctgcttaaaagttataagcagagtgaagataattataatgtggtgaaagctaaatatgaacaggggactgtcagtgaatatgataagattagtgcggatgtgcagatgcgcagcttgaaacctaccgtggtgtctgcccgtaacggagtgaatttggcaaatttgcagttgaaggtcttgatgggaatggagtctgatgtaaaggtagcggttgaaggcaatctgaaggattatgaaatgtctatgtttactcgtcaggcaatgcctcgtccagacaatttgacaaataacagtacgttgaagcaattggaactgaatgcattgcaattaaagcagacgctgaagttgcagtataccaactttatgccgaccctttctgccagtttccaatatatgtatacttcaatgaatgataatttcaagttcaaggaatacgattggaggccctattctactatcggcctgaatctaagcattcctttgttcaaaggaagtaattttactcaattgaaacagacccgtatccagatgaagcaactggaagagaaccgtatcaatacagagcggcaactcactatgcaagctaccggttatttggataatatggccgctagtacggaacaggtggtaagtaataaagaagctgtctttcaggcggagaaagggcgtactattgccgaaaaaagatatgaagttggaaaaggaactatcttggaattgaatagttcggaagtggctttaacagaggcccaactgacttataaccagtccatctatgactatctggtagctaaagctgatttggatttagtcttaggcattgatgaagtaacggaacaataacacattaacataaagataacagtatgagaaaatattttcaattcgcagcttggctggtggtaactatgctgggggcatgttcaggtggaacggagagtaaggaagctgctgataccgctatggaggacaaaccggtagtccggcttgcttccgtaacttcccgcgatgtagatcagatagaggaatatactgccactgttgaagcggaagcgaaaaataatatagctccgacctctcccgggcgtatagaccgtatttttgttgaagtgggagaccatgtatccaaaggacagaaattagtacagatggatgcggcaaatctgaaacaaatgaaattgcaattagaaaatgaagaaacggaattcagacgtatggatgaactgtacaaagtgggtggagcttccaaatctgaatgggatgcagcaaaaacagctttagatgtacgtcgtacttcctataataatttgttggagaatacgcagttgttaagtcctattcatggagtggttacagcacgtaattttgataacggtgatttatattcttccgcttccactcctgtgttggtcattgaacagatcactccggttaaactgttgatcaatgtatccgaaccttatttcccgaaagtgactaaaggtatgatcgtaaaggtgaaatttgatgtgtatggtgatgaggagttcgaagggaaagttagtttggtgtatcctactattgatgctgctactcatacttttcctgtagaggtaaaattggctaatacccgtcagcgtatacgtccgggaatgtttggccgtgtgactgtgagctttggtacattgcggcatgtggtggttcctgatcaggctattgtgaaacgtgccggttcgggcgaccgttatgtatatgtctacaaagacggtaaggtttcctataataaagtagaattgggacgtcggatgggaaccgaatatgaattgatttccggggtggaggataattcgcaggtggtggttgccggtcagacccgtttggccgatggtgtggaagtggcagtaaattaaaaattgagaattagttgataatactccatatttatttacctatatatgattttttagttcttaatttttaatttaacaaacatgagtttatacgaaggagcggttaaaaaaccgattatgacctcgttatgctttttggccgtagcgatctttggtctgttctcattgtcgaaacttccggtagacttgtatcccgatattgataccaataccattatggttatgacatcttatcagggtgccagtgcttccgatatagagaacaacgtaacccgtccgttggaaaatacgttgaactcggttagtaatttgaaacatattacatccaagtcttcagaaaatatatcagttatcactttggaattcgaatatggctatgatattgatgtgttgactaatgatgtgcgtgataaattggatatggtgagttcggagcttcccgatgaagtcaatactccgattatctttaagttcagtacggatatgattcctatcctgctgttgtccgttcaggcagaagaaagtcagccagctttgtataagatattggatgataatgtagtaaatcctttggctcgtgttcccggtgtgggaacggtgtccattgccggtgcgccgaagcgtgaggtgaatatttattgtgatcccaacaaactggaagcatatgatctgacgattgagaccatcagttccattgtcggggctgaaaataagaatactccgggtggaactttcgatgtgggcagtaatacctattccttgcgtgtggaaggagaattcaaggacccgaaagaaatggagaatatcgtagtgggtatacgcaatggtgcttcggtgtatttgcgtgacgtggcaacggtagtcgattctgtagaagaacgtgctcaggaaacctataataacggggtgcagggagccatgattgttgtacagaaacaatcgggagcaaactcagtgaacatttcccggaaagtaatggagcagttgcctaagttacagaagtcactgcccagtgatgtgaaactgggggttattgtgaacacttcggataatattttgaataccatcgacagtttgacggaaactattatgtatgccattctgtttgtggtcttggtggtatttgttttcttaggtcgttggcgtgctacggtgattatctgtatcactatccccatgtcattgattgcctcctttatttatttggctatcacggatgggggatctctgaatattatttctttgtcgtgcctttctattgcgattggtaatgtggtggatgacgctattgttgttttggaaaacgtaacgacccatatcgagcgtggctccgagccgaaacaggcggctatccatggaacaaatgaggtggcaatttctgttatcgcatccacattgaccatgattgcggtattcttcccgttgacgatggtcagtggtatgtcgggagttttgttccgtcagttgggctggatgatgtgtgtcattatgactatttctactatctcggctctgtcatttactccgatgatgtgtgcgcagatgcttcgcttgcaaaaaaaacaaagtaagtggtttgtcacattctacaaaccgatagaacgtgcgttggatggattggataactggtatcagaaacgtttgaactgggctgtccgtcaccgcaagaccattattgccggttgtttcgggttctttctgctgagcctgatttgtgcgaaaggaattggtacagagttttttccgtcacaagacaacagtcgtatttctgttcaattacaattgcctatcggagctcgcgtagagcgtgcccaggcattggcccaggagctgaccgaaaggtggctgaagaaatatgaaggggtgatgcgtatctgtaactatactgtgggacaggctgatgcggataatacttgggcttctattcaggataatggtagccatatcatttcattcaatatcaacctttataatcccgatcagcgttctgttacgttggcagaagtctgcgatggtatgcgtgaggatctgaaagcctatcccgaactggataaagcccaggttatcctgggtggtagcagtggaggcatgggtggacaggccactgccgattttgaaatctatggatatgattttacagaaacagataaggcagccgctgaattgaaagaagctttattgaaagtgaacggtgtgtctgaggtgaatatcagccgtcaggattatcagccggaatatcaggtggattttgatcgtgaaaaactggctttacatggtttgaatctttctacagcagctttgtatctgcgtaaccgtgttaatggtgctttatcttcttactatcgggaagatggtgacgaatatgatatcaaggtgcgttatgctccccagttccgtaccagtattgaaagtttggagaatattctgatttataccaatgaaggtaaagcgattcgggtgaaagatatcggcacggtagtggagcgttcagctcctcctactattgaacgtaaagaccgtgaacgtattgtaacagtatctgctgtgatttcaggtgcgcctttaggtagtgtggtggcagcgggtgagtctattattgataagatggatttacctggcggtatcagtatccaggtggcagggtcttatgaggatcagcaggattcattcagcgatctgggaactttggctgttttgattattatattggtatttattgtaatggctgcccagtttgagtctctgacctatccgtttatcattatgttctctattccgtttgcattcagtggggtattgatggcattgtatggaacggggactacattgaatgtcatgagtttgttgggaggtatcatgttgattggtatcgtagtgaagaatggtatcgtgcttattgattacattaccttatgtcgtgagcggggtatgtctgttattcattcggtcgttgtttcgggccgtagtcgtttacgtccggttttaatgaccactttgaccactattctgggcatggtgccgatggcgataggaggaggggaaggttctgaaatgtggcagcctttaggggtgtccgtaatcggtggtttgactgtatctaccgtgctcaccttgattttggttccggtgctctactgttcatttgcgggtacaggtatcaagcgtaaccgtaagaagatgaaagcttcccgtgaactgaatgactattatcaagcacataagacggagatgaccaaaggcaaaaaagaataattaatatagttgttatccggattgaaatgaataggagaccggatgacagaacttaaaataaaaaatggaataatgaaatcagttttcatcactttcgaccaagctttttacgaacgtattctggcgttgttggaccgtcagaattgtcgtggattcagttattggcagcagttgcaggggcgcggctctgtaaaaggagaaccgcattatggcagtcacgcgtggcccagtatgtgctcggccattatgacagtggtagatgataccaaagtggagcctttattggacgctttgcataaaatggataaggaaaccgaacaattgggattacgtgcttttgtgtggaacatagaaaggacgatttgaatctgtcttttcatcattaaagaaaaagactgttgccctctttctggcgcagtcttttttctttttttagcctctatcatgaagtactccgtctaaaaaatcactacttttgcggttaatttacaaatatatcaatatgaaaaactatataccggccacttttcttctcactcttattgtagtaggagtgttaatggggctgtatttcctcccctccatgtcggtgggcggcaaaccgttgcgcaaggtggacctgctggctgatatccgtccggatgtggaagaagaagtatgtgattccgacaccattgtccttcctcctcctgtaaaacctatttttgtggatacatgtaaaacgggtattacctgtattgaggattattcggattccaccatgcggggaatgaaacatttttatgaggcactttccaaagtgaaaaccatgaaacgccctgtgcgtatcgcttacttcggtgattcttttatagaagctgatatttttactgccgatttgcgcgaaatgcttcaacaagaatttggtggttgcggagtgggatatgttcctgtaacctcttccatcagcggttaccgtcctacggtacgccatacttttgggggatggagcagtcattcatccaatgactccgttggttttgataaaatgcagcaagatatttccggacattatttttttcctcgtgaaggtgcttatgtacagttgaaaggacagagtaaatacgcttcccgactggatacctgtgaggtttctactttttatttcctgaataaaggttttgccgctgtccgttctaaagtgaataatgctgcggaaggagagttacatgaggaagtaggaacaggaggtgtgcaggctgtttcggtgagaggaaggataggacaagtacggtggagtgtggaacaagctgattctgttactttctatggagtggctatggacggcaggcagggaatatctttggataattttagcgtacgtggtagcagtgggcttcatttacgtagtattcctttacatacgctttgcgatttccaacgtcttcgtccatacgatttgattgtggtccaatatggtttgaatgtggctacggaacggggagtaaaatacgatggctataagaaagggatgctttcggtgatagaacatttgaagacagcttttcctgaaaccagcattttactggtcagtgtgggtgaccgtgaatataaaaacgagaatggagatctccgcaccatgcccggagtcaagaatcttatccgttatcaacagtccattgcggctgatagccatatcgctttttggaatatgtatgaggcaatgggaggtcaaggaagcattgtcgatatgatcgggcaaaaaatggcgaatcttgattatacccatatcaattttaagggaggcaagcatttggcaggtatcttatttgaaacattgatgtatggcaaagagcaatatgaaagacggaaagcctatgaggaggaataacagatttcctggtctgtccggtatagcaatggtattgttcctgttcttgctgtttccatgtctttatgctcaggatgctattccggcattgtcccggccgttggagccgcttcgcatacccggtgaaacaaaggaaatgcatcggggtatgcggctgataacagtacatgattcacttccggcgagttttactcattctttggataatgtgatagaagatgagaaccgttcgctttctcctttctttcaaaagttgaatgatatgacaggaccggtacggatagtccatataggtgattctcatgtgcgggggcatctttatccattaataacccgtcgtcgtctggaacatgattttggtgctgaggctgtttatcctgatgttatttcatatcgtaccggtgggttggcacatgaaacgggcgaaccgggtattgtttatcatatgattggcattaatggagctacttctgttactttttctgatgatgaaaaaataaaagaaatagcttctttgcatcccgatctgattattgtttcttttggaaccaatgaggcacatagccgccgttatctggctcaggctcacaaaatgcagataggcagactgttgggtatgttgaaagcagcctgtcctgaagcggcttttttactgactacacctcccggagcatacgtgggacgtcgtcgtgcacgtaccattaatccgagaaccgtaacggcggcgcgtattataaaggagtatgcacaagagaataaaatggcagtttgggatatgtataatatagtaggaggaaagacagatgcttgtcgtaactggacgaagcaccacatgcttcgtgcggatggcattcatttcactcccgatggatatcgtttacaaggtaatttattacatcaggcactgattaaagcgtataatgaatatgtggcaactggattggagtaaactggctgaggtattgacttataatgccaagcaaccgatgatttttagcagcggcttgtttttgtttctgtttttaggctttagcctgatttatatgttattgcagaagaaggatacggcacgcatcctgtttgtaacgctgttttcttattatttttattataagagtagcggtttttattttttcttgctgggggtggtgacagtgacggatttcttgctggcagggcgtatggcgaataccgaaactcaatggaaacggagggttttgctgctggcaagtctgggaataaatttaggattgctctgttatttcaagtacaccaatttcttttatcagatactggctcctttgtggaatgggaaattccagccgttggatattttcttgccggtgggaatatcgttcttcactttccagtctttaagttataccatagatgtttaccgtcgtgagctggttcctttgaacaggttgctggattatacattttatgtgtctttttttccgcagctggtagcggggcctattgtacgtgcccgcgattttattcctcaaatcaggcaaccgctgtttgtttcctcggagatgtttggcactggtgttttctttatcatcagcggattattcaagaaagctgtaatctccgattatatcagtgtaaattttgtggaacgtatttttgataatccggctctttattccggggttgagaatttgtttggtgtatatgggtatgctttacagatttattgtgacttttccggatatagtgatatggctatcgggtttgctttgctgttgggtttccgtttccctatgaactttaattcgccttataaagccgatagtataaccgatttctggcatcgttggcatatctctctttctacatggttgcgagattacctttatatctcattggggggaaaccgcaaggggaaggtccgtacttatattaatttgtgccttactatgttgttaggtggtttgtggcatggtgcatcttggaattttgtgatatgggggggatttcatggaatagcactggctgcacagaaattctggcgtaacttgctgcataagcctaagacggctggcagtaagggcattcgtaaattttttgcagttcttgttactttcaattttgtttgtttctgctggatatttttccgtaatacgacttttgaagcttcggttgttatgttgaagcagatatgtacagctttccatcccgaggtattcatgcagctgatagaaggttattggaaagtgtttgttttgatgggaatagggtatttgctgcattttgctcctgatagttggcagaatgcgtgttgtcgtggagtggtaaaattacctttattgggaaaggcattattgttggtagtactgatttatttggttatccagataaagagcagtgatattcagccgtttatttatttccagttctaacggaatagttatcaaatcgggggtctgactagctatcttttcagacaccctaaatactattctagtaagtatttattaatgcatctacgatcccaatttatacctctctttacaatttttgcagggatgcctgctaatattatattcggttcgttgaatactttggttacaatacttccccaacccacaatactgttatcgggtatttttgtatttttaccaatctttacatctttccctacccatacatgcttgcctatttctatactttgagcaaaattaatcggttctccctttaaatttgttatagtatgtgcgtcggtacaccaaatatcaatgccccagcttaattgactgtcttctcctatgctaacatttgatttatcttcttgtaaatataaagtaactccattgataactacacgattacctatatcaactctacaattattggcaactcttgaaacaccagctcccaaaccgggcaactggccgatgatgagttttagtccactcatccctagtatgttggaatagcgtaaaatgattgttcctaaattaaccgtgttatcgtttcccttgataatcaatagaaaaccttcgttaagaagtagtttttcaacattctattctgaatcgaaatgcatggaaacatgattgttgtttcctgtaattatgatatgggattgatggatgatttgattgaattgttcatgatgggaggatatacaatctattttcttatgtggtaaaataattgtaatttcattgccttgaccgttgatgtttttcatctcatcctaatttaatggattgtacaactttttttattttatatttgaagagtattcttgtattatcgcgttggttagtttagagaatatttccggagacagtaaataaaaaggagtgtcttctttttctttttcaaagcgtataaatagatgtttgatgtctcgaacttccggatattcataagcttctattctttctatatgtattccttcttgtttcaattgttttaatatgtgtttccattgctgcttggataggaaccggcatacatcatataaggagaggggtgttccgtccgaagctgttatgatagtagaagttatattcattttgatgatttgatgaggacaaatatagcaataaaaaattatatagtttatgggggcattgactaaatgccagaatattatttattttcagttccctttatgatataaagtggggatgaaacttgcaaacttgcaaaacttgcagcacttccacacccacacacgtgcgcgtacattataatgtggaaaaatgagagaacataaggagaatgtgacaagcaagggtggaggaggacaaacggacgatgcaggggagagctgaaatggaggaaagcatgacggagcacagaaagtggagcggggaaaagggagagatgtgacaggatctttggtggaaagaggagggaccgtataagaagaaaaaaggaaatcggaagacagaaaccggaatcggacagacacaggtggcaaagggatgactgcccgaatcttcagcaggtacttgtataggccgggccttccgccaatcatgctggtacagcttgtacaatcctggggagaacaagctgtcggcatgaggaataacgcgttatcaatctaaatggaacacgttactaacgtgcaggcctgtatgttagtaacgtatagggccacacgttactaactttacggaacacatgttactaacctttcggaacatatgaactgtatgaagacgcacggcatggcatcctgttccgaggcaccgtcctgccagaagacctgccagctgctgttcttcagccggcactggctgtagtaatggtcttttaaagaaatctcctcatcaagacgcatatatttcgcaaaagagaaaaaacgtgaacaagaaaacaggaggagatcagatcattcacagatcacaataaagaaatagagtggaattctggaacatattattttgttgcattataatgtacgcgcacgtgtgtgggtgtggagatgctgcaagttttgcaagtttgcaagtttgccttccgtttttccgtcttttcttgttttccgtctgctgttttcgtatgggttccttcctttttccgtccctatacgcgcgtgcgaatattataatgtgtctgtctttttcctcccgtgtcctccgttataaaaacatgctttgtaacacatctgttattcagagtattacaaaaaagtttcaggaaatccgtataatttttccttcttatgtttgctggttatcgttaaaaggtctacctttgcatccgcaatcgagagagatgcggcacttcagacagtgtgtgactgacttggtgaaacaaacgtaggagagttttccttgacagtgtctgcacccagtatcttaccttagcggggctaagggagcgagaacggataagacgtggggaggatggacgtcccgccttttatggaagtttcgaaaaaaactttttcaaaaaaaactttcgaaaacatttggtgattacgataaaatctcttacctttgcatccgctttcggaaacgatggcaagacataaatgagagttctttgaaagatttaagataaacaaacaagtagtacaagccggtgcaccgtatataatatatatatatggtgtacggaaaaacaagaaccgtcaatattgatattgatagatttggaatccttgagcagattatcaactgaacagttggaaaaagatattattacaatgaagagtttgatcctggctcaggatgaacgctagctacaggcttaacacatgcaagtcgaggggcagcatggtcttagcttgctaaggccgatggcgaccggcgcacgggtgagtaacacgtatccaacctgccgtctactcttggacagccttctgaaaggaagattaatacaagatggcatcatgagtccgcatgttcacatgattaaaggtattccggtagacgatggggatgcgttccattagatagtaggcggggtaacggcccacctagtcttcgatggataggggttctgagaggaaggtcccccacattggaactgagacacggtccaaactcctacgggaggcagcagtgaggaatattggtcaatgggcgagagcctgaaccagccaagtagcgtgaaggatgactgccctatgggttgtaaacttcttttataaaggaataaagtcgggtatggatacccgtttgcatgtactttatgaataaggatcggctaactccgtgccagcagccgcggtaatacggaggatccgagcgttatccggatttattgggtttaaagggagcgtagatggatgtttaagtcagttgtgaaagtttgcggctcaaccgtaaaattgcagttgatactggatatcttgagtgcagttgaggcaggcggaattcgtggtgtagcggtgaaatgcttagatatcacgaagaactccgattgcgaaggcagcctgctaagctgcaactgacattgaggctcgaaagtgtgggtatcaaacaggattagataccctggtagtccacacggtaaacgatgaatactcgctgtttgcgatatactgcaagcggccaagcgaaagcgttaagtattccacctggggagtacgccggcaacggtgaaactcaaaggaattgacgggggcccgcacaagcggaggaacatgtggtttaattcgatgatacgcgaggaaccttacccgggcttaaattgcagatgaattacggtgaaagccgtaagccgcaaggcatctgtgaaggtgctgcatggttgtcgtcagctcgtgccgtgaggtgtcggcttaagtgccataacgagcgcaacccttgttgtcagttactaacaggttccgctgaggactctgacaagactgccatcgtaagatgtgaggaaggtggggatgacgtcaaatcagcacggcccttacgtccggggctacacacgtgttacaatggggggtacagagggccgctaccacgcgagtggatgccaatccccaaaacctctctcagttcggactggagtctgcaacccgactccacgaagctggattcgctagtaatcgcgcatcagccacggcgcggtgaatacgttcccgggccttgtacacaccgcccgtcaagccatgggagccgggggtacctgaagtgcgtaaccgcgaggagcgccctagggtaaaactggtgactggggctaagtcgtaacaaggtagccgtaccggaaggtgcggctggaacacctcctttctggagaggacgaaagatcgataaggtttttgttcttgtactgctggtgttgtttattcaagatatgattccgtaatgatacggaagagagaaagtaagaagccgggtctaattaaacagactaggttgaacttagtcctatagctcagttggttagagcgctacactgataatgtagaggtcggcagttcaactctgcctgggactacgaacggaatcaagttcgggggattagctcagctggctagagcatctgccttgcacgcagagggtcaacggttcgaatccgttattctccactccatcggaaacgtaagaaacgaagatgaacgatctatgacatattgtacaagcaaacagtaattttagtagtaaagagctgaaagtatatatcatcccgccggcacgcaagtgtgggcgaatggataaggaaagtaaagaagggcgcatggcggatgccttggctctcggaggcgatgaaggacgtgataagctgcgataagctttggggaggtgcaaatgacctttgatccagagatttccgaatgggacaacccaatatcttgaagaggtattatcttactatgtaagaggctaacgcagggaactgaaacatcttagtacctgcaggaaaagaaaataaacaatgattcccccagtagtggcgagcgaacggggaacagcccaaaccatccatgttacggcatgggtggggttgtaggactacgccgttgcatgaagacatcagagaagaactttctggaaagaaagaccatagagcatgacagttgcgtattcgaatgttgtcgaagcatagtagtatcctgagtagcgcggagcacgaggaattctgcgtgaatctgccgggaccatccggtaaggctaaatactcccgagagaccgatagcgaaccagtaccgtgagggaaaggtgaaaagcacttcgaacagaagagtgaaatagttcctgaaaccgtgcgcctacaagcggtcggagctcgttaatgagtgacggcgtgccttttgcataatgaacctacgagttgcctttgccggcaaggttaagtgtgacgacacacgtatccgaagcgaaagcgagtctgaagagggcgtatagtcggcagtggcagacgcgaaaccaagtgatctacccttggccaggttgaaggctgggtaacaccagctggaggaccgcaccaataagcgttgaaaagcttctggatgagctgagggtaggggtgaaaggctaatcaaacttggagatagctcgtactccccgaaatgcatttaggtgcagccttgcgggttactgatgtgaggtagagcgactgataagatgcgagggcttcaccgcctatcaagtcttgacaaactccgaatgcgcatcagttctaccgcaggagtgagggcatgggtgctaaggtccgtgcccgagaggagaagaatccggaccacctgctaaggtcccgaaatgacagctaagttaaactaacgaagtctgactgctaagacagctaggatgttggcttggaagcagccattcatttaaagagtgcgtaacagctcactagtcgaggagtcgggcgtggataataatcgggtatgaagttgtctaccgaagcagtgggatcattaatatgatcggtaggggagcattccagtcggcgtcgaaggcgtaccgtgaggtattctggagcgtctggaaaagcaaatgtaggtataagtaacgataaagggggcgggaaaccccctcgccgaaagactaaggtttcctgatcaacgctaatcggatcagggtcagtcgggtcctaaggctcagccgaacggcgatgccgatggcagaaacggttaatattccgttactaccttcaggagtgacgtggagacgcagtagtgacagtgccgccatctgacggaatagatggttgaagggtgtaggagtcgatcatggcaggcaaatccaccatgagatccgaacctgacagtatgccgcgtccttcgggacaaggcaatagtgcgcgtaagcatgctgccgagaaaatccgctaaacttaatcctgcaggtacccgtaccgcaaacggacacacgtagtcgggatgaatattctaaggcgcttgagtgattcacggttaaggaactaggcaaactgaccctgtaacttcgggataaagggtccctacccttttatgggagggcgcagagaatcggtccaggcaactgtttaacaaaaacacagggctgtgccaaatcgaaagatccagtatacagcctgacacctgcccggtgctggaaggttaagaggagatgtcatcgataagagaagcgttgaattgaagccccagtaaacggcggccgtaactataacggtcctaaggtagcgaaattccttgtcgggtaagttccgacctgcacgaatggtgtaatgatctggacgctgtctcaaccgtgagctcagtgaaattgtagtatcggtgaagatgccgattacccgcgatgggacgaaaagaccccgtgaacctttactatagcttatcattgaatctgggcacgtgatgtgtaggataggtcggaggctttgaagcaggtacgccagtatttgtggagccgctgttgaaatacgaccctttatttgtttggattctaacccgtggaacggggacattgattggtgggtagtttgactggggtggtcgcctccaaaagcgtaacggaggcttctaaaggtgccctccggccgattggtaaccggccttagagtgtaatggcataagggcgcttgactgggagactgacaagtcgatcaggtaggaaactagagcatagtgatccggtgtttccgtatggaagggacatcgctcaaaggataaaaggtactccggggataacaggctgatccctcccaagagctcatatcgacggagtggtttggcacctcgatgtcggctcgtcacatcctggggctggagaaggtcccaagggttgggctgttcgcccattaaagtggcacgcgagctgggttcagaacgtcgtgagacagttcggtctctatctatcgtgggcgcatgaaatttgcgtggctctgacactagtacgagaggaccgtgttggacagacctctggtttgccggttgtgccgccaggtgcattgccgggtatctaagtctggatcggataagtgctgaaagcatctaagtacgaagccggccacaagattagatttctcagggtcgttgtagactacgacgttgataggatgcaggtgtaaagatggagacatcaaagccgagcattactaattgcccgtccactttccttatatgtcggatggtgtatacctttggtttttactacagaatgaaattacgataacagctcaacaatatgtcaaccttattcaggtggctatagcacaagggttccacctcttcccattccgaacagagaagttaagccttgtcacgccgatggtactgcgtcacagtgggagagtaggtagccgccgttttgattgaagcctccggacttgaagaagttccggaggctttttttgtatccgcacgtgtgaaatgtgacctctactattgctcatctcccaattatggattacttttgcccataacctaaaaataatacgtcaatggatacattattaccatttgcattactatgctttacttcttttttcacattaaccaacccgttgggaaccatgcctgtatttttgactatgactaaaggaatggatgatgaagaacggcgtcatattgtgaaacgtgctactatcatttcctttattacacttctggcttttactttttccgggcaatttttattcaaattctttggaatatcgaccaatggctttcgtattgctgccggttttattattttgaagattgggtatgatatgttgcaggcacgttttactaatacgaagttgaaagatgaagaaattaaaacgtatgccaatgatatttcaattaccccgttatctattcctatgctttgcggtcccggtgctatagctaacggaataatgttaatggatgatgcaaatacttggaccatgaagggaattctgatcggaataattggtttgatttattttatcacctatcttatattgcgggcttctacccggttggtttctattcttggtgaaactggaaataacgtgatgatgcgcttgatgggacttattctgatggtaatagcagtagagtgtttcgttagcgggttccgtccgatattaattgatattatccaatcaagtaggatttaatcaaaaaagagaatgtgctcgaagtagaaaacgatcactttgagcacattttgggtaattgtatagatgtggttagtcaaattcgactagtatacggaatacttttccgggagctgccgcccattctttcatggcctgtattgctgcttcgggcttgactactttgctgatcaattcattttttgggcaagtaccttgttccatgtagcggataactgctctgaaatctgtgggcaatgcattacgtgatccgcggatatcaagttctttttggacaaaatatttagtttgaaaagaaacttctgattttgcataccctatacataccactctcccggtaaatccgacttcattgacggccataacataggttgcaggactgccgacagcttcaatgactacatcaggaccgagtccttccgtaatctttgtcaggcattcatgtacattttctgtcatggaattgatggtatggtgagcacctatccgtttggcaagttccaatttctcgtcgtccaggtctacagcgataacggtagctccgcgaagagctgaacgtacaatagctcccataccgatcattccgcaaccaatgaccatcactatatcaatatctgtaacttgtgccctggaaaccgcatgaaagcctacgctcatcggttcgatcagtgcacagtcacgaggaggaattcgatgggccgggattattttactccaaggcaatgcgatatattcacacatggctccgttgcgctgaacccctaaagtttcattatgttcacaggcatttactctgccgttacgacaggaagcacatttaccgcaattggtatagggattaactgtaacgctcatgccgggttttaaagaatccggcacatccttgcccacagcttctatgacagctcctacttcatgtccaggaataacgggcaactttaccattgggttacggcctaagaatgtattcaagtccgagccgcaaaaaccgacgtatttaattttcacaagaacttctcccggttccaagaccggtttctcgatgtctactaccttcatttcggaaggagcggtaatttgaattgctttcattttttatttatttttaatcagtttaatcaatcactttgtatcctttccagccataataggcgcaaaacaggaaacaaatcataggaatagtataggctatatgatagatatgttcgttcagatgcatcatataagctgtgagttggggtaagcaagcatttccaacgatggccataactagaaatgccgagccacttttggtgttgttgcctaaatcagtcaaagcgagcgagaactgagtgggatacatgatagacatgaaaaaagagatgcccagcatggcataaagacctgtccaaccgccaaaacaaaccacaacaatacatagcaagacattaatcagcgcatataccaatagcatgtcttgtggacggaattttaccatgagtagtgtgcctgtccatcttcctgccaaaaaagccagcatataaaggccgaaaaaggtggtggctgtattttcaggtagttctgcataggtacaacagtagactagaaataaactgttaatggctgtctgaccaccattgtagaagaattgtgcaataactccccaacgaagatgagaacgttttaagactccgaaatcaattaatttttctcctttatattctactccttccatcgtatttccttctttgattttaggtaatttggagaagataaagatgatggcaataacaatgagtagcatagctagcagcagataaggaagtttcatggcgtctgtttctgtttgaatgtaaccttcccagccaccgggaaaagaagtgggcagggtgtcgcgggtatagtggttgccactcagaatcagtttgctgagaaacatggcagctataaaagctcccagcccattgaatgattgtgccagattcaatcgacggggcgcacttttcggatctcccaaagcggttacataaggattggctgccgtttctaaaaaacacattccggtggcaatgataaagaatatgcatagatatgcccaatattctttcagcatggcagcggggaagaacagtaacccaccacatgccgccagtaataacccgaaaataattcccgatttgtagctgtattttttcatgaacatagcgatgggaatgggacagatgaaataggcaagccagtaggctgtttctgtgaatgatgcttcgaaagcgtttaactcacaggttttcatcagctgtcttatcatagtaggtagcagattgctgctgatagcccataggaaaaacaggcagaatatgagcatcaatggtacataatagttcttatttttcatggtatggatttataagtgtcagttgattattctgacatgttttttatgtaaggaagagatatgagatttttgaaaccataaaatctttcggcgtttttacctaaaaaaagtgctttctcttcttgtgtcatttcagtcgttttaaggatgaaatcgtaagacatcttgtaagtaatggccgtaatggtccgagggtaatccgatccccacatcagtttgtccatacctaccagatctgctgcttctttaatggctttaaccgctccgtgaaacggatagaattcactgttgaacaaccaggtgatccccccggattctatcatgacatttttatggcgggccaactttatttgttcttgccaatgaggtgtggtgaccatgccgaaatgtccgatagcgattcgaagctgcggatattcctgaatgatttctttcatttcctgtacttgtgtatccccatcggctaaatcaatggaaaggataatgtctttttcttgcatgtaatggaacatttccatcatttcgtcactgttcagcatgactcttccttcttttagaaaaaggcggtgtgccgggatttttattgctttgaaaccggaacttattaattccttggcctgttgcagataaccgggtttacgaaattcgcacataccgcatacaaagaaacggtctgggtatttatgggacacttttgcgaggtattcattttggatgccatcaataaattcctgagtgactacggcagccgatacttgtgcatagtccatgttcgagagaaaaacctcggcactattccgcccgtcaatcataaagggcggaaccatctgacgttcttcccccataaataacgaacgtccgttggttaaagtacggataggcaatccgttgacttccgtatcttgccgtagccaaagatgggagtgtgcatctattatgttaaaatccatcattattttcctttgtattatgaattagcccaactgatacgcatttgttttccgataatttcttgcacttcctttacaaggttccaatcaatgggttcttcggcatatgttatatttttcaatacattatccggattggccgaactgaacaaagtggtggcgatacgtggattgctgacagaatattgaatagccagtttctctataggataatttttggacaggcaatgttgaacagctttccgacaggcttctaccagtgattggggggccggatgccatgcaggaaccccacgttgggagagtaagcccattgaaaggggggaggcattgataatgccgatattctttgattcaaaataatccagataatcagtcagtttctcgtcattcagacaataatggcagaagttaagtacgctttctactgttcccggttccgagtgatcaatgatccattttaagttttctaattgcaagtctgtgatacctacatgtcccacaatacctttctttttaagttctaccagtgcaggtaatgtttcgttgactacctgattcatgtctgaaaactctacatcgtgtacattaatcagatcgatatattcaatgtggagtctgtccaagctttcatacacactttccgttgcacgttttccggaataatcccatgtgttgactccatcttttccatagcgtcccactttggtagagagataatatttgtcacgtggtatttctttcaatgctttgcctaatacggtttcggccttgtagtgcccgtagtagggagatacatcaataaaattcattccattctctactgctgtgtaaacagctttgataccctctgcttcgcggatatcatgaaaaactcctcctaatgaagatgcgccgaaactaagattggaaacccgcataccggttttcccgatttcattgtaattcatagctctatttatttttagatttatttccggcatcaaaaatagaggaataacctttaggtatatggtggaagaggttgaaaaaagtacgtaaacctttgcgtaaaaataataagacggttactttttatatagttctctatattgctgtggagtaacgtctgtgatttttttgaataggcggttaaaataagaatggtcttcataagcaaggagataggctatgttttttacgggaatatcctctgtaatcagaattaattgggctttctctatttttttctgattaatatattgtagcggtgtggtaccgacttcttttttgaaaagacggataaaatgatcttttgagaggcatgagattgctgccaatgagtctatatctactgttttatagatattttttcggatgtgggacaaaactttttggatacggttatcgttgacttccactttaggtttggcgtcttttaaaaagcgggcaataagttgatatactatacctctggattcgactttgtcacagaaggtacgctgtttatttttaatgatgtttctgattaatgtggggttgttgtcatagcttgtcgggtcggattgaggaagctgcatggtaggatttatttcacataaccttttaataagtggtaattccaggttgcccgcaggtatttctatcgggaaattccaatcttccagaatgccggattccgattgatggtcttcatatatatggagataataatgagtgaaatgagaattgcactgataactatgggtagtgaatgatggcaccagatatagatgatgtggttttagttcctgcattccatcgggaaatattatttgggcggttccttccattatataatagagtcgggtaaaagggctgcttacgtttttccagttccagtctgcattgtgaatggctagtcctacatttaatataagtaaatgtaattggtcgattgattgtgtcatattccttaagttattagaatgaaagattcagtttcgtacaaagtaagcaaaagtatatatataatccaatgggaaatcgatattttcatatcaaatcacctgttttggtatttgtttttgaattatttcaggtaaaagtcgatattatcctacataatggcgcatttggataatataaattggtttcaactctgtatatttgcactattgataattgaaaaacatataaagcaattatactatgaaagcaaaacattttcttttggcttcggctttgttgctttggacgggagttttggaggctcagacttaccaggtacctgtttcagagaaaaatgaaaaaatgcaggagggagagttcgaacctacttgggaatcattgcagaactataaagttcctgaatggtttagaaatgccaaatttggtatttgggcacattggggaccgcaatgtgtggaagggtccggcgactggatggcgcgttctctctatttggaaggttcgcgcgagtataagcaccatgtggaacattatggccatccctctgaagtgggcttcaaggatatattgcctttgtttaaagccgagaaatgggatccggacaaattggtttccttttataagaagattggtgcccagtatttcttcgctttaggtaatcaccatgataattatgatttatgggatagccaatatcaggaatggaattccgtgaatataggccctaagaaggatatattggcgggctgggctgaagcagctaagaaaaacggtcttccatttggtatcagtttccatgcggaccatgcgtggagctggtatgaaccggctcaacgatacgaccgtcatggcgagaaggcaggtgtaccctacgatggatgtttgactaaagaagatggtaagggtaagtggtgggaaggctacgatcctcaaaaactttatgcacagaatcacccgttaagcgctggaagttgggctgacggtatgattcaccgtcaatgggcatggggaaatggtgtttgtattcctactcaagaatatgtgacaaacttttatgatcgtacagtcgatgcaataaaccgttataatcccgatttgatttattttgatgtgactggtgtaccgttttatcctatcagtgatgcgggtttgaagattgccgcacatttttataatcacaacatggttgttcgtaagggggatttcagtgctgttatgtttggtaaaattcttaccgatgaacaacgtaaagctttggtatgggatgtggaaaggggatctcccaatagtatttatgaagagccatggcagacttgttcttgtttaggcggttggcattatgataccagattggcggagaacggctggtataaaagtgcttccgatgtagtgaaactattagtggatgtggtcagtaagaacggtaatttgttgcttagtgttcctcttcgggctgacggaactttcgatgaaaaggaagaagccattttaaatgaatttggtaactggatgagtatgaataaagaggctatttatgatacacgcccgtggaaagtcttcggagaaggtccgatagccaatgctgatatcaagattaatgcccaaggtttcaatgaaggtgcttacactaaagccactgcatctgaaatccgttttactcaaaccaagaaatatctctatgctacagtccttgcatggccggaagaaaagcaagttgtcattcaatcgctggcaacgggaagtgagttgtatcctgataaaattactaaaattgaattgttaggttatggaaaggtatcttttactcgtacagcgcaaggagttgttattgatatgcctgatgtacagttgaataagattgctcccgtatttaagataaagaagtgaatatagcataaagtaggtttatttatcggcttttttaggtcggtaagcccttgttatgtcttgaaaattaacccaataatcaatagaataatgagaaacagattagaatgtatgcagccaataagattcttggtggtcttgttgatgtgttgcctgagctatactacttgggcacagacacagagtaatgtcaatggtttggttactgatttttccggtgagccgttaattggggtcagtatcttggttaaaggtacttccaatggaactgttactgatttggatggcaaattttctctgtctgctgaaatgggaaacatgctccagataagttatgtaggttatatttcgcaagaaataaaggttgaaagtaacaagttacttcgtattataatggaagaagatacaaaaaagttggaagaagtagttgtagttggatatggaacacagaaaaaggtgaatttaacaggagccgtatctgctgtttcagctgaagacttggctagtaagcctgttatgagtactgctcaagcactggcaggtttggctccaggtttaagtgtattgcaaacttcaggtcgtcccggacaaggagcaactgttaaaattcgtggaactggtacattttcaaaagctggaacagatccattggttttgattgatggtttatcaggtaacattgatgatgtagatcctaatgatattcagagcatttcttttttgaaagatgcagcttctgcttctatttatggtaatcgtgctgctaatggggtgatcttgattgaaacaaagaagggtgcacaaggtaaaacgactattacatatagtaattcttttggttggcaacggcctacggaattgcctgattttttaccatcatgggaatatgcggaatattataatatggctatgcggaatatgggtaagcaggaagcttatttacctgaacagattcaaaagtatagagatggatctgatccggataattatccgaatgtaaatcacttaaaatggctgttggaatctggttctggttttcaacaccaacataatctcagcatacaaggaggaaatgctacgacaagttataatttatcagtaggttatagaaatcaggaaggtatgacggcaaaaacgtctaatgaaagaatgactgcactgtttactatgaaaagtgaaatcgccaaagggctgatgcttaatttgaatattaatgcttataataataaatataatgctcctaatggcgaaccacaaagtattgatggaatgataggatatgctgttcgtcagggacctatttatgccgggcaaaagtcggatggaagttttggatatcaggataattatagtccggaagcgtggttggcgagtgaatcttttgtgcagaatgtgagtagaaatataagtgcttccggacaattgacatggaatactcctgtagacggactttcttttataggtaaagctggggtgaattactggactaaatatgataaagcgtaccgggctgatacttattttgatgatagtaagacagtggggcccgctactttaaatgtatggactgcaaataatacgtatactacctttgaagcattagctacttatgaaaaacaaattaaaaatcatacttttaagttattggcgggtacttctgtggagcaatctaataataaaggtttggaaggttatagaaatacgtttcctaataattatttgtatgaattaggttctggagataaatcaacagctactaatgatagttcattggaagaatatgcgttgctttcttttttcgggcgtataaattatgcatggaaagatcgttatttattagaggctaatttgcgctatgatggatcgtcacgttttgcggacggtcatcgttggggacttttcccgtcagtttctgcagggtggagaatttctgaggaggatttttggaagaatgcggcagtttcagctgtagttgataatttgaaattgcgtgcttcctatggtgtacttggtaatcaaaatataggtgtttatccttaccaacagatttatgaacttggacatgattatccttttggaaatccggcaactcttcagtctggggcttacatgaaaacctataataatccggaaattacttgggaaaagacggctataacggatattggtttagattttagtttattgaatggacgttttagtggaacattggattatttttataaatatacttcggacattttagcaccagttgaggtgtctagtattatgggacgtgaagtcggacaatctaatgttggagctgtttcgaacaaaggaattgaaataaatctgacttataacggacaaataggacgtgatttccggtttagtatttctcctaattttacatgggtaaaaaatgcagttgagaaattggcgaacggagctaccgaagaaattaataataacagaattgtagggcaaccgataggtattatatatggatatgaaactgatggactgtttgtagaccaagcggaaatagatgcggctcctgagcaattggtaagtaagtcaggattgaaacctggttatgtgaaatacaaagatattagtggtcctgacggggttcccgatggtaaggtggatgcgcaatatgatcgtaccgtattgggaagtactaccccgaagttttattatggtttgaatctttccgcttcttataaaggttttgatttttcagctttattacaaggtttaggaggtcataagcgtttgataggatcttatatggcttatgcattctacaacggtggacagatacagagatggcaggctgaatcttgttggaaggaagaaaatcctgataaatgggctgaatatcctcgattggaaactttgaatatgaatgacactaatcttcaaacttctgattattgggtccgtaatgctagtttcttacgagtcaagaatatacaaataggatatacattcccaaaagcatggactaaaaaaataggtttggaaaatgtgcgtgtttatgtaagcggacaaaatctgttctctttcaatagtttctataaaggttgggatcctgaaaatgagataggaacaggggattctccctcttattatccggtcaatagtatttattcattcggatttaatttcaagttctaagtaaatcattcaatcaagaatcattatgaaaaatatatataatacattaggaatgacaaaggcttgtttatgtgctttggctgtatcactagtaacaactggttgctcggatttattagataaggagccaccttcagcaatttctgatggtagtttttggactggtgaaggggatgccatgttggctttgacaggatgttatcgtttccagactggttggtcgcatgatgattttgctacgccacaagggttgctctatttggattttgcaggtggaaacggaacggaaaaggaaaatttttctactttaatggctagttccaatacggtggctactaacagtaatttacgttggtattggggaaatgcatatacgcaaatagctaagtacaacacttttctagagaatattacggactgtccgatggaagaatctaaaaaagaacagtggtctgccgaagtgaagtgtttacgagcttatttctttttaaatttggcattttattataaggatgttcctatgcctttgaaaactctgtcggtggacgaagcgaattctatctctcaaacacctcagactgaagtctattcgcaagtggagaaggacttgaagactgctatagacttgttgcctgtccaatattcttcagaggaatatggccggtttaccaggggggcggctaaggtacttttaagtcgtctttatctggcacaagagagatggggagatgctgctactattttacgtagtgtgattgagtcgggaatatatgaattggatcgtcgtaatggagaggacagctatgagaaactttttcaaataggaggtgaatatagccctgagataatattttgtattatggggataaaggatttgtatactaattcacgttatcaatatttatatcctgaagctgcttatggagggtggcatcagttctcaccatataacgaattggtgaaagaatatttctgtgcagacggcaaggacattaagacttctgaggtttatgatgagaatgatccttatgttaatcgggatttgcgcttgtatgcttctatttttttacctcctttgggaagttatgagggaactaagtataatgatataatttatgattgctttaagggagctaatactgcagatagctataataaatttgccttatttaatggatattgtccgaagaaaggttgtgatccgtctataactaataatttaggttctactcccacttatactcctataatgcgttatgctgaggttctattaagctatctggaagcggtaaatgaatcgcagccgaatgcagtagaccagaatttattggatttgactatcaatgatatacgtgatcgtgtgaaattggttggaataaaaaagacagacgtagcgacacaggaacttgttcgtgaagcagttcgtaaagaaagacgtgtggaactggcattcgaggggcttcgatattatgacgtgttacgttggggcattgccgagaaagaacttaatcatacatttaccggagtaaaattgtcggatgatcctcaagctcgtaattatagagggagtggggctactgcttctccggtggatgaaaatatgtattatcaatttgagaaacgtacatgggcaccccataaccgatattttcctattcctcaaaatgatttgaatgtaaataagaatctgaaacagaatgagggatataattaagcaggattaagtttaagataagatgaaagaaaatggatatgaaatgaaaagatatggctatccggtaaagagatattgtcagacaatggatttgaaggatgatccggagctgatagcgaagtatcgggagtgccacagtaaggagaagtcgtggcgggagatcagagaggggatccgttcagttggtattttagaaatggaaatatatatatgcggtaatcggttattcatgattgtcgaaactcctattgatttcgattgggaatctgctatggctaaacttgcgactttaccccgacagcaggaatgggaagattttgtatcggtattccaacaatgcaggaaaggggaacttgctaaagaaaaatggagtatgatggaacgtatgttttatctatatgaataattaaaaaagagaggaaagagagggtgctgataaagtattctctttttccttaaaatataatagaaggtacattgaacaatttaatgattatgaaatattttactatcattgcactgttgtgcttatcctgcatttcatgtacgatgcaaaacaatttattacaatctcctaacggtaagatagccattgaatatcatgctgaaaaaggtttttctgttatttatcatagtgggcgggataaagttaaaatgatgtcattacctgaaataggtctaaaaacgtcggatacggatgattgctttaaattgataagctcaactcctgtaacttctgtagttgatgattatgaaatgctgactggtaaacgcaggcattgccataatgaggctaatgaatgtacctatcgatttgaaaatgtcaaaggacttcgggtagatcttattttccgggtttataatgatggtatagctttccgttatcatcttcctaaaaccaaagaagagattgtggttcttgatgagtacactgcatttgcttttactccaggtatcaagcgttggacacaaaaatttactgtaggttatgagggcttttattggccaaatacggacggcgttgcagataatgagggacgtgagtggagttttccaacattgttccaaccttcggacagcgcttttgtactattaaccgaagccaacatattacgtgataacacaggagcttatcttactaatgcagctgattcttctatctataagataaaattatcggatgaacggttgatatgcccatccggctggtattcaccttggcgtgtcgctatcataggaacattagctgatattgtcgaatcgactttggtaactgatgtgagtgaaccatgtaaaatccaagatacccaatggataaaacctggattggtctcttggatatattgggcatataatcatggttctaaggattatcaaatagtgaagaaatatattgattttgccgcagactttgatttgccctatatgttgattgattgggaatgggatgcaatggggaatggaggaaatctgaatgatgcaatgaactattgtaaagagaaaaatgtaactcctttgatatggtataattcttctactgcatggtgtgatcctactccgttatatcggttgaataccccggaagtgcgtgacaaagaatttgaatggctaaaagaaataggtattcagggagttaagatagacttttttggtggagattctataggtacgatgaattattatattgatttgctggaggatgcagccaggcataaattgttagtcaattttcatggggcagctattcccagaggctggcaacggacgtacccaaacctgatgagtgtggaagcggtatatggggccgaatggtataataataaaccgacattgactgataatgcagcttggcataattgtaccttgccttttacccgtaatgtgataggtccgatggactatacgccttgtacatttaccaattcacaacatccacatatcactaccgatgcgcatgaattggcgttacttgttatttttgagtcggctctacagcatttggcagatcgtcctgaagggtataggcgacaaccggtagaggtacagaactttatcaggtatcttccggttgcatgggaggataccagactgctgtccggttatccggctgaaagtgttgttattgctcgtaaaagtaaggatagttggtatatttccggtttgaatggtacggaaaatacaaaatcatttcgtgtgaatttggagtttattaaagattctattcagcttatccaactgttttcggatactactgatgggaaacaaataaaaattgaaaattcggcattcgataccaaagaattgaatatagagtgccagcctcgcggaggttttgtggtatgggttaagttgaggaaataggataagggtaagtgtttttagcatatagacaattgttttgatattgctatggaagtttttattaatgatgatagataagcttatccctttgaggagatagaataaaaatagtttatgctggattggtggaaggttaattaatacttattgataactaatataaagttagagtttatgaaacgagaacttatttttacattctgttgtctgttgaccactttggtgtggtcgcaggaatatcagcggacagaaacaggcattaaggcttctatttttgggaaaaagatagatgtggaagtgcaatggtttaatgctaatagtctgcgcgtgttgaaaatgccgcatgggcaatcggtagataagaaaagtctttcggttattgcaagacctgaaaaaacggttcttaaagtttctacgtcggaagatggcaatattgtaatgaagagccgtttactgacggtgaaactagacacaaaaacaggtgttctgatttatgaaacacgtaatgggatgcccctattgaaggaattggagaatgtgaaggcattcatacctgtcaatgacgcagggcgggctacttattctgtttaccaaagttttaaaaccgataaggatgaagggctttatggacttggacaacttcaaaacggacagatgatgcaacgtggaatagagaagtatctggtgcaaggcaatacagaagacgtaactcctgtttttcagtcgactaagggatatggtgtattttgggataattatgcaggtacgatgtatgttgacaatgaagaggaaacgtcgttccgttcagatgtaggcgattgtatcgattattatttcatgtatggcggttcggctgacggtgtaattgcacagattcgcttgctgaccggttctgttcctatgatgcctttgtggagttatggatttatgcaaagcaaagagcgctataagagccaggatgaagtggtaagtgttgtgaagaaataccgtgaattgggcataccgcttgactgtatcattcaggattggcaatattggggaagtaactatttatggaatgcaatggagttcctgaattacgagtaccgtgatccgaaaaggatgattgatgaagtccacggcttgaatgcacacatgatgatttccatttggtcttcttttggtccaaagactaaacctttcaaggaacttgagaaggaagggttgctgatggatatggctacatggcccgaatcgggtgtggaaggatggccgcctaactttgattatccttctgacgtgaaggtttatgatccatatcatccgaaggctcgtgatatttattggaattacttgaacaaaggtatctttcagcttggcatggacggatggtggatggactcgacagaacctgaccactttaaccccaaagattcggatttcgaccgacagacttattccggttccttccgtagcgtacggaacgcttttccgctcgtaacagtaggcggagtgtctgatcatcagcgtgctctgactcgcgataagcgtgtcattatcttgacccgttcaggattcttggggcaacaacgttatggctcaaatgtatggacgggcgatgtaggatcttcatgggatatgtttcgtaggcaaattactgccgggttgaatttttctctgacgggaatgccgcattggaatactgaccttggcggattctttgccggttcttataacaatagcttgggaggtggaacggctacaaaaaatcctatgttccatgaattgtatgtgcgttgggcgcaattcggtgtattttgtccaatgatgcgtagtcacggggctgatgcacctcgcgaaattttcctctatggtaaagctggtgagccggtgtatgatgcattggttgatgctataaaactccgttattcgttgatgccttatatctattctacatcttgggaagtaagtcatcgtaattccacgtttatgcgggcactattcatggattttctcagtgatcctaagacatggaacatgggcagtgagtatatgtttggatcatcctttttggtggcacctgtattacatgcccaatacactcctgagcaggcacagcaaatcttgaaagagaatgaagggtggggctgcaaagcgcaggagtctgatatccctctattgtctgtcgattttactcaatctaaagaaatggaactatatttgcctgccggtagccaatggtatgatttttggacgaacgaagtggcagaaggtgggcagaagctgaaggtgacgactgtgttcaatcgtattccgctttatgtacgtgctggaagcatcgtgccgttaggtcccgatgtgcaatacgtgaccgagaagaaatgggacaatctcaaggtttgtgtttatcctggtgccgatggtaattttgtgctttatgaggatgaaggcaataactataattacgaaaacggtgcttatactgaaattccgatgacttggaatgatgccaagcggacattgactattgatgcacgtcgtggctgctatgaagggatgctggatgagcggaagtttacagttcgaatgccggatggaagtgaaaagacagtgctttataaagggaaaaaaataaatgtgaaattttagtatgccacatgatttttgagaactagtttcttctagtaaagaaaagccctcgaaattatccgatttcgagggcttttgtctgtttctatacgtaaacttgtgcgcgtgataggactcgaacctacacgtctcacgacaccagatcctaagtctggcgcggctaccaattacgccacacgcgcgacattgcttttggtaagcgggtgcaaagataagcaatatttcttaagtaccaaagatttttagaaaattattctttgtggctatgtaaatattcacgtgcagcctcaataatggtatctacattgcgttgcatatcctctgaactcatattgactttgatgtccggatctataccgaattccagatgttgcatatccgcatcgtacatggggctggccgagaagcggacagaccagccgttgggcagttcggaggagaagggcaggccggaaccgccacctgttttgtcaccgatgatggttactttaggtagtattttcattctgttcacaaaatcattagtggcgctgaaagagcggcggttagtcagcactaccgcctgtttttgccagcgtacgcggtctagtgacggttccagccaaactgctttgggactggagaagtcattgtgccccggtccggttttatgggacatatagcctaccagcactttttcattcgtgaaacgtgcggctaatttctcggctgtggtaagattaccacccgaattatttcgcacatcaataatcaacccatcacaaatagccagtttgtttagaacctcgtctagatttccttcaccgatgcccgattggaaactgccacaataaatataggctatattgtcctcgaatatctgatacttcatacccgaggattgggcataatccttacctagataaacacgttggatgctgtcgctgaaattggccggatagctgtcaaaccattcacgatattgggagtactccagtttggaagacagatttacgtgtccgtcacgcaactcgttcagcatatctgccagaacttcgaataactgttcattattcatgcctttggatattctctgtttatactggctgtatatttcattccagtccaatccgtattcctgctttttatagtcaaggaaacaatactggcggtcgatagtctgccataatgcttcgaagttgccttcgggggagttgtcgtattcgtcctccgtgatgcacgaagtaaataatacaacagacaataacagactgataaaaatataactatttcttttcatcctctatattaataagggctgacccggctgggcatcgccactttgttcttaccttttaataaataaaagtttttcacgaaacctatcataaaggcgtgtgaccatatatgacttttcagattattgactttcgcctgctggatatcacataggtatccgaaacgcatattgaccgaccggataggaaaatccaatgtaaccagctgtcgcaaggaaggttggttatgcagggaagtgaacagcacattcttgccgccattctttaaactgaatatctcataataagattgtccgtattccggggaaaacataacccccatgacaggcagattggcttgataacgggctatcagcggatagttaccgatatgaaaccgatagatgaccatacccgatgccgccagattgacatatgctttagcttgggcgggattattggaatttcgcatgttatagatgaacccgccgttcaagtccagcatgggacccgccagtatcttcaagttttctgtcagccggaactggtaatgcagtgcataattccaattgaccatacctgccatttcattacttgtttctgctttattctctgtcagggacagattggcttggaacagactttgaacagacacgttgccattcatcagtttggtcatgcgcatactttcacgcaggatacgaatttcgggtccggtatattccatcggtgaaagataggtgtccaatatatttgtaaaaccggcaccgtaaagagtagctctcataacgtagcggtttgcttgtaagctgtcttcctgcgcctgcgaagacagccccaaaaacagggacagtaataacaggagaattttcttcattttttaaaacagtttcatctggccggtaatttcatcaatgatatctgtttcactcttaccatgatccggatcttcaatttcggcagtttcttcgttttcatcagtcccctcttccgcaccgtcctcttctttggaaggttcggggaagcgtaaaggttccagttcatttatttgttcaatgttgtaagtactgattcgttttcctttcgctttgaaactcttgattccgatgaattcgtccacatctatttccaatggatcacggaaactgtcatgtcctccgaatatgacttgtatgcgtggataagccacacaagtaagcaatatagaacgactttccttattctcgcccaaataattgagacggcgtgaagtggattcaaaagtgaatcgtttcagataaggatatccctggtcggcatcaaataaagcggcggaccataccttgttggcatcgaacttctcgatgatgtggatccccggatcataatgattgttcaaatcaaagttactggtatagaattctccattttcatggactattaaaatcaattcgtcactttggaattctcccagatattcaccgcgtccgtcatagttcaagcggagtacatcccggtcaaaccatacttttcttccacccagggtagagccgccacgttgtttcaaggctattttatgtacttcgtatttagacaggatattgcccatggactggcgtccctttatattgatgtcactgaaatctttttcatatatgatttttttgatacgcggattcggctttaaggtaatcttgataacctccgcttccccattgggattggctgtaaagtaaacgatacgtgagccgggcgtaccttgcgttacatcatattcacggtcgcgggtgatggaggtaatgttgaatcgtttgatatagtgaaacccttcttttccatcccgatagaccacattgtatatggtacgtttgtcgtttttcttgaagatattgacatagagaacattcttgccgacaaacattttgtctgttacacgaaccactttgtatttgccgtctttatagaagataatcacatcgtcaatatctgaacagttggctataaattcatcttttttcaaggcggtgccgataaagccttcttcgcggttgatatagagtttttcgttagcttccactaccttcgccgcctcaatggtatcgaagttacgtaactctgtacggcgggggtattgtttgccatatttatctttcaacatctgataccagtcaatggtatattctacgatatgtgccagatgattgtttatttcttcaatctgttccttgatacgggctatgttctcatctgctttatccttgttgaacttcagaatccgggccatcttgatatccaataacttcagaatatcctctttggtcacttcacggataaattgcggatagaaaggagtcagccgttcatcaatgaattcgcaggcggcatctgtattttcggattgctcgaactttacttccttataaatccgttcttcgataaagattttttccaatgatgcgaaatgaaggttttcaagcaattctcctttgtgtatttccaactcttgacgaagcagggacaacgtgttgtccgtggcttttttaaggacggcactgactgtaaggaagtggggtttcttttcatcaattacacagcaattgggagatatgcttacttcacaatcagtaaatgcatagagcgcgtccaaggttttgtccgaggatactcccggagcaaggtgcactaggatttccactttttcagaagtaagatcttccactttccggatcttgatttttcccttttcactggctttgacaatagagtcgcatacccccgggacagtctttccgaaaggtacttcggctatggacaatgttttgttgtctattttattgattttagcacgtactttcaccattccgccgcgttctccatcgttgtagcgtgatacatcaatagagcctcctgtctggaaatcgggatagagtttgaattcctcaccacgcaaataggcaatggaggcatcacacagttcgttaaaattgtgtggcaggattttggaagaaaggcccacagcaataccttctactccctgagcgagcaagagcgggaatttgacaggtagggtgatcggctctttgtttcgtccgtcgtatgatgcttgccattcggtggttttgggattgaaaaccacatccaatgcgaatttggacagacgtgcttcgatataacggggggcagcggcaccgtcgcctgtcagtatgttaccccagtttccctgacagtctatcaacagatccttttggcctagctgcaccaacgcatcgcctatggaagcatcgccgtgcgggtgaaactgcatggtatgtcctacaatgtttgcaactttgttatatcggccgtcatccaatcttttcatagagtggaggatacgtctttggacaggtttcaaaccatcattgatgtgcggtacggcacgttccagtattacgtaagaggcatagtccaaaaaccagttctgatacattccgctcagctggtgcttcacccctgtgtttttggtatcggcaggtttatagtccaagtgtccgttctccggcgtggggatattttcttcgttttgttcctctttatcaataaaatcgtcgctcatatatatttaaattccttaatgttctgatgatatgcacgcaaaaatacgacttttattgaaaaaaatcatttactttgcatattatttcgcccttattaaaggttgaaaacaggaaaaaacaacaaaagtgtaagaataaacagataagaaaatggcacaagaagatgtttttaagaaattagtatcgcactgtaaagagtatggttttgtatttccgtccagtgatatctatgacggactgggcgctgtatacgattacggtcagatgggagtggagttgaagaataatatcaagcaatattggtggcagagtatggtgctgctgcacgagaacatcgtaggtattgattctgctatttttatgcatcctactatttggaaggcttccggacatgtggacgcattcaatgatcctctgattgacaaccgcgattctaaaaaacgttatcgtgccgatgtgctgattgaagaccagcttgccaaatatgacgagaagataaacaaagaagtggccaaggctgccaagagatttggtgatgcttttgatgaggctcagtttcgtagcaccaacggtcgtgttctggagcatcaggccaagcgcgacgctttacatgaacggttctcaaaagctttgaacgacaatgatttggatgaacttcgtcagattatcattgatgaagagattgtttgtcctatttcgggaaccaagaactggactgaagtacgtcagttcaatttgatgttctctaccgaaatgggttctactgccgatggtgccatgaagatttatcttcgtccggaaacagcgcagggtatttttgtcaattacctgaatgtacagaagaccggtcgtatgaagattcctttcggtatcgctcagattggtaaggctttccgcaacgagatcgtagcccgccagttcattttccgtatgcgtgagtttgaacagatggagatgcagttcttcgtaaaaccgggtactgagctggagtggttccccaaatggaaagaaactcgtttgaaatggcataaggcattaggtttcggtgatgatcattaccgtttccatgatcacgataaactggcacattatgccaatgcagctacagacattgaattcctgatgccgtttggattcaaggaagtggaaggtattcatagccgtacgaactttgacttgagtcagcacgagaagttcagtggcaagagcatcaagtatttcgatccggaattgaacgaaagctatactccgtatgttattgaaacatctatcggtgtggaccgtatgttccttagcattatgagtgctgcttatacagaagagacattggagaatggtgaaactcgtgtggtattgaaattgcctgctgctctggctccggtgaaactggccgtgatgccgttggtgaagaaagacggcctgcccgagaaggcgcgtgagattatgaatgacttgaagttccatttccactgccagtatgatgagaaagacagcatcggcaagcgttaccgtcgtcaggatgccatcggtactccgtattgtatcacagtagaccaccagactttggaggataattgtgtaactttgcgtaatcgtgataccatgcagcaggagcgtgtagctatttcggaactgaacaatatcattgccgataaagtaagtataacaagtctgctgaagactttgcaataataaatgtattatgaataaaagtattctttggctgattggtctgctgtttgttacttccctgtccattgtttcatgtagtgagacggatgggacagaagatccatatgcaaactgggaagagcgtaatcagcggtatattgactccattgctacagtggcggaagccaatcgaggcaatggagaagggcaatggaaaatcatccgttcctataaacttccatctttgggattgaatgaaacaggaaagatcattgataatgtttactgtaagattcagaaagtgggagatggtactgagagtcctattgctacggatacggtagcggtgaattatcgtggtcaattgattaacggtacggtttttgaccaaagttatcagggtgagcttgatccggaaactgccattcctagaaaatttctggtaggtgcggtgatagcagggtggagtacggccttgatgaaaggatttggtggtatgaaagccggtgaccaatggaagctttatattccttatccattggcttacggaaaagatggtacagaaggtattcccggatattcaacgttgatatttgatgtgaatttggttgatatattcccgttgaagggtacgggaaaaagcattgatgataccttggatgctaaaaaatagctatcatagaatattggaaagaagagagtattgcagtttgttgcaatgctcttttttttatggtgttttgattcatgtcggttggacgagacgggggcctgtcaggtgaattgtttggggatttgctgaaatgattttgggaggtatggcgttttccttggtatggttaatggttcttttatccgcttgctacgcgttccattgtctgtaaggaatggtttaaaggttggggtaaaacggtttaattatattatattaagaagggatattcagtaaatgtctctaaaaaataagatggcatatgaagatgatagggcatgaccatttcatatgccattcttattgtcatttttccgtgctttctcacatacttctatccgacaggacatgacgttccggaagaagtctgatgacctcttctgattctgtgagtaaaatcatatcatgctgctttagctgttttgtttctgattttttctatcatcagtatggcatttgccgtatgtattccaaagaaaatccacagtatttccgtcttcctgtttctggcctttatccttgagagcgagtaatgttgcttttgagtgccgaagcttccttcaagccgtgttgccctttcttttgagagttcgcttctaagcaccttcctcaaaggctcatctttggccgcccttcccttgcgcacaaaggatgtggatatcccatattttgtacagaactttctgttggcattattggcatatatggaatcggcagccacacatcttacccttacattcataagcttctgctgcatacggatacagtccttcaagcgtataccctcattgaatgccttgaacgagaggtgttcgatgaacgatatgccgtctatctgtatattattgacctttgcaccgaactcgacggacttggtttccttgcctctgacgatgggacgtacataatgacggtcaatgctgacgatgcggtcactgactttccgcccttcaaacatttccttttcttgtacaagcacctttctgatgatggaaagacgcttatgataatcctgggtatatcggagtaaaggaccgtactcgctatggatcccatccctttgactgaggagcttttcaagaagcttgatcatacggcgcttaagcattcttgtccttgaagctctcctctttcttttcttgcagtaggacagataggattccgccacattcctgtatttgttgcgcggacgccttatgcccagctccctgcaatgccggcatatatgcctgtagagccattcgaggctttcccaaaggagtttcatgtccgtaggaaaacgcatgtggctttcatagcatgtggcatcggtcatgcagacgtgaaggttatcaagataaggtttccagtgtgaagccaggagctcctggaaagaatcaatgtcaaggcgggatgctatctcattacggatggcactgactatcttgaagttggttatgggaagggacgggggaatcataattccacagaaaatctggtagtgtatgttcccgttcagatgttccaccagttgcctgtcggagaatccggtgtatgccttcaggaccataagggcgatctttgcggaaggactgaatctgttcctgcgtcccaggcgccggtccgacaggccggcggcttttgccatacattcaaacggaaagaccgaatgaagcttgccaagctcactctcattaaaactcttgcggtatttttccagaatatcaaattctgtaaaacccaaagtagggtgaatttctgaaatattcactatctttgccatatcttattagtttggatatttcccccgttttggccgtcaaatcttattttcgggggaatacctaaagatacaaaaaagccaactaattcgcaatactttgtgtatgaattagttggctgattttgtaatatttaatgaatgtccctaagaagaactcttgacggaaacaagaagattgttttatcggggatataaataaaacacttcgttttttcggtatccgccgaagtgtttttcctttcagcataatgttgtgggatagtttgacgggcgaataactgtaagaaacaatataatctttatcttggtcaattcattaaaccaatgattgacgcaaagataaagattatgacaaattatttaataaattatttcacgtttcctactttgatcaagtattcggcaatctgaacagcgttcaatgccgcacctttcttaatctgatcgcctacaatccagaaagtcagtccgttttcgtttgccagatctttgcggatacgacctacgtaaaccggatctttacctgccaggaacaaaggcatcggatattctttcttttcgggattgtccatcagtaccaggccttcccctttggcaaaggcttcacgggcttcttcaggagaaatggggcgttcagtttctacccagatactttccgagtgagaacggagggcgggaacacgtacacacatggcgctaacctgaatgtcggagtgcataatcttgcgtgtttcgttgaacatcttcatttcttctttggtatatccattgtcggtaaatacatcaatctggggaatcaggttgaatgccaactggtaagcgaatttctctacggtcacgggctcgttagccaatacttgacgatattgttcatacaattcatccatagctgctgcacctgcaccgctggcagcttgataagtagccacatgcacacgttttatgtgtgaaagattttcgatggctttcagcgcaactaccatctggatagttgtacagttggggttagctatcacgttacggggacgattcaaagcatcttccggattcacttcgggcactaccaaaggcacgtcggcatccatacggtaagcgctggagttgtcaatcagtacggcaccatgtttggtaatggtttcacaaaactcttttgtggtacctgcgccggctgatgtgaaagcgatatctacacctttaaagtcatcgttgtgctgaaggagtttcacttcaatctgtttaccgcggaatgtgtattttcgtcctgcactgcgtgaagaaccgaataacactaactcatccaacgggaagttcctttcatcgagcacacgcaggaactcttgtcctacagctccgctcgcaccaacaattgctactttcattttgttttttgttttataagataaaatttagtaatactttagaactatctctcagcatgtaagtacgttctgcgtgcaaaattagaacattttagaatataaatcagtaaaaaagaaagttttttcgtaattttgtcgatattatggtataaaacttaaaaaaagatggaactattcgaccttaacatacattttccggtcacagatcctacctggatattcttcctggtactcattatcattctgtttgcccctatgattttggggcgtttacgcattccgcatattattggtatgatacttgccggggtagtggtaggcaagtatggctttaacattctggagcgtgacagcagttttgaattgtttggaaaggtaggactttactacattatgtttttggccggtcttgagatggatatggacgatttcaagaaaaacaggacaaaaggattggtctttggtatgtttactttcctcatcccgatggggctgggcatatggagtagcatgagtatgctgaactatggattcctgacttctgtgctgctggccagtatgtatgccagtcacaccttgattgcttatcctattatcagccggtatggcttgtcgcggcaacggacggtcagtatcactattggtggtacggcggtgactgtggtgctggctttgatggtgctggctgttattggtggtatgtataaaggtgaggacgtaggcggactgttttgggtgctgttggttgccaaggtggttttgctgttcggacttatcatatttttaatgcctcgcatcagccggtggtttttccgtacatatgaggatgcggtgatgcaatttatatttgtgctggctatggtgttcctgggcggaggcttgatggaactggtggggatggaaggtattttgggagctttccttgccgggctggtattgaatcgttttgttcctcatgtttctcctttgatgaaccggctggagtttgtgggtaatgcgctgtttattccctatttcttgattggggtgggaatgattattgatgtacgttgcctttttacggaaggtgaagcgctgaaagtggcggttgtaatgaccgtagtggcgacattcagtaagtggctggctgcatggataacccagaagatatatggcatgaaaaaagtggagggcagcctgatattcggattaagcaatgcacaggctgctgcgactttggccgctgtgttgataggtcacggtattattatggaaaatggagagcggttgttgaatgatgatgttttgaatggtacggtggtcatgattttgttcacttgtattataagttctgttgtgacagagcgtgccgcacgcaaaatggtgacccaggaaaatctgatggagggcagcgaaggtaaggaacaggaacgcatcttgattccggtagctaatcctgaaaccatagaaggattggtaggcatggctttgatgatgagacatcctaaacaaaaagagtcattggtggcactgagtgtgatcaatgataataatacttcagaaaccaaggaactcataggcaagcgtaacttggagcgtacggcgatgattgctgctgctgccgatgcgtctgtaaagactgtgttgcgttatgatttgaatattgcgcaaggtattattcatacgcagaaagaatatgcggtaacggatattgtaataggtttgcatcgtaagacgaatttgatggattctttctttggtacaatgacggaaaacttgttgaagggcacgaaccgccagattatgatcgctaaattattgatgcctgtcaatacgttgcgccggattgtggtggcggttcccgataaggcggaatatgaaaaaggtttcttgaaatggatgacacagctctgccgtatgggtaaacaattgggatgccgcgtgcatttctttgctacggaagatacattgaagcatttgcgtgccctgacagaaaaacaggaggcgaatacttttacggagttttctttattggaagagtgggatgatctgcttttattgaccggacaggtgaattatgaccatctgtttgtggttgtgtcttcgcgtaaaggttccatctcttatcagacttcttttgaacgtctgccgtcacaaatcagcaagtactttgccaataacagtttgttgattgtgtatccggatcagttaggggacgatccgcaagagattgtttcgttttctgaccctcgcgggcaatcggaaacacgagtatatgataatgtaggaaaatggttctacaaatggtttaagaaaggtgatgaacgaaattaatatagagtggcagcaacgtacggagttgttgctgggaaaagataagatgaaacgcctgcgtcacgctcatgtgctggtggtaggtttaggtggagttggggcgtatgctgccgagatgatttgtcgtgcaggagtaggccgtatgacaatagtggatgcagacattgtgcagcccagtaatattaatcgtcagcttccggcccttcactctgctgtgggacgtcccaaagcggaaattttggcggaacgtttccgtgatattaatcccgatttggaattgactgtattggtggagtatctgaaagatgagcgtattccggaattgctggacagtgcaaaatttgattttgtggtggatgccattgatacggtagctcctaaatgttaccttatatataatgtgcttcaacgccgtctgcccattgtgagtagtatgggggccggtgctaaatgggatattactcaggttcgttttgccgatttatgggatacttaccattgcggattaagcaaagccgtgcggaagcgtttgcagaaaatggggatgaaacgaaaacttccggttgtatttagtacagagcaggccgatcaggatgcggtgatattggtagatgatgagaaaaataagaaatctactgccggaaccgtgagttatatgccggcagtctttggctgttatctggcggagtatgtgataagaagaatttgattatgatagaattacagggaataacgaagagtttcgggacattgcaggtactgaaaggtattgacttgatgatagaaaaaggagaagtggtaagtattgtggggcccagcggtgcggggaaaactacattattgcagattatgggaacgctggataaggcggatacgggtactattttactgaatggtacagaagtgagttgtttgaaggaaaaagagttgtcggcttttcgtaaccggcagattggctttgtgttccagttccaccagttacttcctgagtttacagctttagagaatgtgatgatgcctgcgttgatagcaggtacgtcttcttccgaagctatgcggaaagccaaagaaacgctagcttttttgggcttgtccgaacgtgcttcgcacaaaccggctgaattgtcgggaggggagaagcaacgggtggcggtagcgcgtgcattaataaacaacccggcggttatccttgcggatgagccgtcgggcagtctggatactcgcaataaagaggaacttcatcagttgttctttgatttacgtgataagttaggtcaaacttttgttattgttactcatgatgaaaatctggctcgtttgacagaccgtactattcacatggtagatggcaggatctctttgaaaatttaatagagcaaagatcagtttaatgatatgtgaatactgtcatgctgttctttccatttgtctatctggaattctccggtatctccctcttccagtagtacaccgtccatactcaggttgactgttgttcttgtcccggcattaagttgtgtagttagtttttgttggtaatgctttattgttccgttacttaactgtacaaagatttgaaacataggattaggctgagaggggaacaccgatacaaaattattgttgaattctgtacggttagtgctgggtttcaacccgaagctgattgttttgaaagtgccttcgggccgggctgaaaaataattcaggttgctatggatattactgatgtatatccacattgaatcaatggcatcactgaaagcatcaccgtttgtttcagacactatgacgcttaaggctgctgaagcatgtttaagatgtgcttgcaggtcatctttccctatatttatattttgtgttccgtatacaaggctatgtatcgggtagtataccgtatctcccggtattttccttagtcctaaactggttgtattcagttttttgcctataattagcgtgggatctgccagataggcatcacctgctgtaccaaagtaatcgggatatccccaatatatcacattgtatgtacctacaggaagccttaaaggatatttttgggattttcctattccattcgtgattaagtaatatgctggaaaaggaacttgttttcccttggctgtataattgcctatataaaaacttccattcgtttcacaaggtagtacttctaatggaccattgtaaggatctgtgctactttggctcagagtggcatatagtgccggagataccagatcttctggttggggagtgacaatgtcacaatcctcgtttttaccgcacgaagctagcagtgccagtaaaggtaaaaataaaaactttctcatgtacatctttagtttaggtttgaatactccctataacaagatatggatgagaaagtttgaatggtataggagaaagttatgcttatactttctcgggaaaactggctttcaggatctcaaatgcccgggcataatctttttcgaagactagaacctttatttccattcccggaatataagccaaaacttgggctgtatattctccctgcaacatggattctataccttcattttttagaagatcctgtaacatgtgtgcgcggacatcacttttgaaagaagtaagaataactgttttcatactcgttccttctgtatcagttgtttcttttttcgatttacagttttgcagaatccggcgtgccacttctcccgttacatcaccgtcctctccgtatgctgcgcctctctcattgaaccggcgtactatttcttcaatggtatcatcgcctattcctgcttcatccaagcgagtcttaagtcctaaatttctaaagaattcttcagttttttctatggttagcgatacccgtacactgggaactcctgaagtaaccccccagatacgttcgccatattgtagtattttgtcacgttttttatcggcgagtgtccgtagagttccgggaaatacgatcgccagggtttggccgtgtgtcatgccatgtagtgcggtcagctcatgccctatcatgtgggtggcccagtcttcggatactcccatagcaataaaaccgttcaaagccatagtggcggacatcataaattcactcatcaagtgatagtcctgtttgttttctttgatttgcggagcgatttgtaccaatgtacgaaggatgctttcgctccagcggtccattagataagattcgtttgttttggtcatgtattgttccatgacgtgtacaaaagtgtctgccagtccgcaagctatctgatagtcgggcagtgagaaagttactgtcggatctaggatagaaaatacaggatgggaggagaaaaatggatatttttcatgagtttcacggcatgaaattacagctccgttattcatttctgaacctgtggcgggaatggttagcacagttcctaaaggaatcgtgttttgtgcactgccttttttaaccagttcccaggcatctccgtcgtagggaataccagcggaaatcaacttggtgccgtctataactgagccgccacctactgccagcaggaagtcaatgtttttttctttgcctgattctatcgcctttttcaaggtagatatatcgggatttgattctattccccaaaactccgtgtaatcacgtccttcaagggcttggattacttgttcatagactccattggtttttacactgccacctccgaaagtgatcatgattctcttgtcggccggtatctgttgggacaattgggcaatcatgcctttgccaaagatgaggcgtgtaggattgtgaaagataaaattatccataactaattggggttttcttggttaatactgagtaaagataatgcttttttcctatctttgagaaaaaatttagctaatgaacgtaaaactgggaaaatacaaccagctggaggttgtaaaagaagtagattttggtgtttatttagatggaggcgatgacggagagattttattgcctacgcgttatgtacccgaaggctgtaagcctggcgatgtgctgaatgtctttctttatcttgacaatgaggaaaggctgatagctaccactttgcagccgttggtgcaggtggacgagtttgcctgtttggaagtggcatggattaatgagtttggtgcgtttttgaattggggattgatgaaagacctttttgtacctttccgtgaacaaaagatgaaaatgcagaaagggagaaagtatataatacacgcacatatagacgaagatagttaccgcattatggcatctgctaaagtggagcattatctttctaaagaacatcccgactatcggctgggacaggaagtggatatcctgatatggcagaaaacagatttgggatttaaggctattgtggaaaataagttcagtggtttgctttacgataatgagattttccaacctttagaaaccggtatgaggctgaaggcttatgtaaagcaggtgcgtgaggatggtaagatcgatttggttctgcaaaagttgggcgcaaagaaggtggatgatttttcggaagtgttattacaatatattaaagatcatgaaggcttcactccattgaatgataaaagtgctgctgaggatatctatgatgcttttggtgtcagtaagaaaactttcaagaaagcggtgggggatttatataaaaaacgcctggttgttttggaagctgaggggatacgcctcacttagtggagcttttccctaccggatataggaaaagccctatgaacttatggggaaaatcaattgtgggggaaagcgatttcccctatttttgtgccatagaactaacaaactaaaaacggaacagctatgaaaagatggactacattactgatagtgatttgtatgctaggtataactattcccgcaatgggggccatgagtatcagcaaaatgagacagaacactcgtttccttaccgaccgtatggcatatgaactgaaactcactccgcggcaatacaatgatgtatatgaggtgaattatgattttatcaataatgtccgttatctgatggatgatgtggtaagaggctatgattatgcgttggaacgttactatgattttctggatgtgcgtaatgatgatcttcgttggatactttccagtgcgcaatatcgtcgttttatgaggactgagcatttctaccgtcccatttatgcgcatgagaacaaatggcatttccgtatttatctggtatataataatgtgaattttttctactatggcaaaccgcatcactatgctagttattgtggagggcattatcgtactcattttaataatgtcagttattataagacccattatcgtgaccattaccgccatgatgtgtacgatggacattatcgtatccgccatgacagaatgacgtatgatatgcaccgtcgtcgtgatttcaatatagctgttcgtcctccacaaaaggagcatcatcgcccggccactcctcctcagactcgtccaaacagacctcaaatccatcctgacaggccgtcgggtgatcatcgtcgtccgtctgttccacaggcaaggccggacagaccgaagaaggatcagaataacaagcatgatgggcgcccttcacgacgtggacagaactcacaggttgataaagaccgtcatgaaaataggcgtattactccatccggcagggatgtgagaagaggaaatggtaagaaagaaaaggaatcgaatcggtcaagagaaagaaataagagcaattccggtgaaagaagtgctgtacgtatgcgcattgtatagtcatggaaagttccttctgcccttagtgctaaaaaagcttaagagaaggcataacggaaaggaaaaaggagtaatattaccccgtaaaacaacaaaacacaataagttatgaaaaacgttattctaatggccttactttgcatgggcttcttttcagcacaagcacaaaatgaatttacgattcaaggaaaagttaaaggattgaaagacggtacggtggtaacactctttcgtacggaagggaatgtggggagtagcattgccaatgacaccgtgaaaaatgaatcattcttttttaaggagaaagcagaggatcaagagatcggaaaatattctatcagctgctatggtgcggagggttttcctcctatggggctggacatatgggctgctccgggagcaaaaatcaacattagtggcaataatacctatatttatacttggaaggtgaaaagtcctgtcgaacaacaaaaggtgagaagcggtttcgttgatagttcacgggaattgtggaatgagtttcaaaagactgttcttgaatattataagtcaatggacgccatgtatgccggaaatttaaatgaggaacagaaaaaatcactccgcactcggtgtgacagtcttcgctatgtgcaggatgaaataaatttgaagatagacgctcgtactatcgaacgcttgaaagcaactccggtatccgaggtttggttggaggagttgaaacggcttgctcaggagagcgtatatatgaaaggctttccatataaagacgaagtggtttccatttataatggtttgtctgaaaccgacaaaaaaacggattccggtaaaaccattcacacttgtctttttcctccggtggtcgtgaatgaaggggatgagatggtggatgccgatttgttcgatttggaagggaaaatacaccatctggcagattataaagggaaatatatgttggtagatatttggagttcgggatgtggaccttgcatcatggcattacccgaaatgaaggaaatatccaatcaatataaagataagctgactgtgatcagccttagcagtgatcctgagaaaacgtggaaaagagcttccggacaacatgaaatgatatgggagaatttgaatgatttgcagggaatgaatggattatatgctaaatacggtgtacgtggaatccctagttacattttgatatcaccacaaggtaaagtcttaaagaagtggactgggtatggcaagggcagccttaaacaaaaaatacgtcgttgggtggataccccttcctatgctatgagtatggtagcttccgaaactaccaccatagtcaattatcccactgtacgtacaagtaatacggatattcatgaaataagacaggtggagttaagtgatacggctgccattgtgcgtgtgcatggatactatattcctaaatattggatacaggtgagcagcagcattgctctgattgccgataatggtacggtctgtcctttgaaacgtgccgagggaatcactcttgaccagcatttctttatgcccgaaagcggagaggctgattatactttctttttcgagcctttgcccaaaggtacgaagacattcgatatggtagagcgaaatgtggcgactcctgataaactggaaggtattgcattgactatgccgcatacttatactatcactggtcatttggaaggagtggaggatggaacttccatcggactttggctgagtgaagggagtatgttcaagcgattggttaatatgcctttgaagaatggaatgttcttttttaccggaagttgtacgaaaaatgaatgttcggaagttctggttaggggagagggctctggttttccgggtacttctttatctgtttgggtggaaccggatgcacgaattgtaattaaagggaaagatagattgtataccgattggcggatagagagtaatgtggaagaacagaaagtgatggaacattttagaggagcggtgaagaaatgggaagaacaggatcagaaattgatgattcaaactgcacaattgtttgaaacgatgtcttctgtaaaacagcaagagaaagaagaaaaaaagatttgggataaagtgaaaaaagtatatgcccaacaagatgttttgcgattgaaaagcgcacctgtcattataaagataatgcaggaaacagaagtcacgcttgtatggataaagaaactgaacgaattaagttacttgtataaattcaatgccggttttaagcagaaagcagaggtggttgctctgtataatcgtctaagtgagaaagacaaagaattggattgcgtgaaggatttgactgtccgactgtttcctcctacggtagtagaagtgggggatgatatggctgatgccgatttatatgatgtgaatggaaagattcatcatttatctgatttcaaaggtaaatatattctgatagatttttggagtcagggatgtgctccttgtttgcaatcgcttcctgaattgaaagagataacggaacattataaagaacggttgactgtggtaagtctttcagaagatactgagaaaaactggaaaagcttttcctctgccaagcagctgagtggcaataattttaatgatttgcaaggaagacatggactgtatgccagatatggcgtgagaggtatcccttattatgtattcatttccccagaaggtaaaatcatgactacttggggaggctacggtgaaggcagtttgaaggctaaaatgaaagaattgctgggggagtgaagtcgtatcacagtattatatagccaaacagaattgatttgctaccggagattcatctatcctatttttcgcaaatcaattctgtttggctatacttattctccttgatggaaatctgaagccatttgtacgctatccgtttgttattatctggcagcaggagggggagtgctgtccgtctatgggatcaatttcattttttatcccgaactcgcgtacctttagtttatcgggctgcaaagctaattgagtttaatgataatctgtgatgaatgatagaaaatcattccaaagtaagaggaactcctttgtagaaatccagaatcttggtacggaacagatagtcatattttgcttgaagcatatccgaaacggctttcatccaattggtacgtgcctcattgtattcagtagcgttggctttaccattggcatatttttcgctcatcagacggaaggaagcttcagaagcatccgtagctgtattactgcttttgtatttgctttcggcagctactgcattatagtatgcttgctgtatttctttgaaaagagcctttttgctttcttccaacttccatgataaagcagtgcgctggatgcgtgcgttctttactttatttcgtgtgtcaaaacggttgaacaacggaatgctgagtgagaattgcaggtatttattaaaattttgatgccactggctgctgaatgaagcattttctactcctgaaatattatagtagtttgttcctatacctgcactgaagtttaattgcggataccaggaactttgggcaatacggatatttttggccgcaccttccagacgaaattgggctgctttaatacttggtttgttcagaacagcttgtgcatagatatcttcgggaagtgaaagcagagtaaaatcatcctctacacggggagatactactccaaatccgtcaggagtaggaagttccaacagctggctcagttctaacaaagctaactgatagttattgtcagcctgtactgctgacatttcgtcttgtgcgacgcgtgcgcgggcttcatagacttcggcttcagatgctttcccatttttgaaataggcttctttcaattccagctgttcccggcttaactctacttggttgtgagctacttttgccaattcttcattaaaaagaatttgtagataggcagaggtgacagaaatgctgatatcttctttggccttgttcaagtcttctgtagctgctttcaggttcagtttgctgagagcgatgttgttcggtatccgcaatcctgtaaataaaggaatactggtactgagtgagaagttggtgtttttggtattacggtcgccgtacgtattgtctgcctgcaaggcacggccgaagttaaatgactggcccacattaccgttcagattaggcagccggctgtatttagcagtattcaaatccactgcattctgatctcttgcagcttcctgttgcttgatactcaggttgtgttctatagcataatcaatgcatttacgtaaatcccatttttcttgggaaacggccggtaatgcagtcagggtggccaaggctataatgatttgtttcttcataatgatattctgttatttcttttctgctccgcgtactttttcattgacattcagaccgttctttatttcaatctggataccgtcactcatacctgtaataacggcacgacggctgaatttctgtgaaggtacactatctgtcaatacgtatacaaaagtagagtcgtttttaaactcaacagtactttcgggtactgccagtaccttgctggcacgtgccagaacgatttccgcatttgcgctatatccggaacggatggtaatactgtcggggactgtgatggctgctttgatctcaaattggttggcaccattttcttctacacctttaggagagatatattctagttgtgcatcaaattccatgttttgtaaggctcctaaagttatttttaccggcatgccttcgtgtatgcgtcctacttccgtttcatcaatattgcctcggaaaatcagatcattcatgttggctacggtggcgatagtggttccgtcattgaatgtgttgctcattatgacggagttaccggcttttacgggcacatccaaaatcaatccgtcaatagtagatcggataagggtactactgaatgaagccttgtttttagtgataccttctttgactatttccaggttatctttggctgtttgtaattcttcacgtgcctgttttacggctacttcactcttttcatattcttcactgctgataagtttgctttcgaacagttttttcatacgggcaaagtccgtttctccttgtctggcattgatttctgccagtcttacacggctttctgccgagtttagttgtcccagttcggggatcacctttactttggcaatcacttctcctttctttattttttgtccggcttccttatatacctcgtcaatgatacctgaaatctgcggcttaatcagaatctcgtcacgcggttctatttttccggtagctacagtggtctttttcagatcggtgatttctgcgtttaatatagtatacacgctggctttgggttgtgatttttgatagagaaatacaaatgttccgatgaatatcagtgcaacgatgactaatagtgcaatttttacatactttttcatatctgtttgttttattatttttttattcttgtttgttcttgcatggaaactttatccgttacgtcggacggctttattcgtctcttatagcctcaatgggtttgatggccatagcgcgataagccggtgccaatccggccagcatacctaggaccatcaataagatgcaggccccgacggccatccagaagctgatttggaaatgagcctctgtacccgaagctgccgttcctatttccagcccttgtaagatcaagactccgaaactaattcccatcaatcctgcaaaagttgtcaataccatgctttcagaaagaatttggtttagaatatctttagggcgtgcgccaatggctcggcggatgccgatttcggttgtacgttctttcacggtaaccatcataatattgcttactccgatagctcctgccagcaatgttcccaaacctaccatccatgccaaaattttgattcctgtgaacagattgtcaatcatgctgaacattgcttctgcattgaccatgatcaccgcttgtttgtcgtccgggtggatatagtgcgctttcttgattacttgttctattttgtcggctatactggtaacggtcacacccggttttacggtaatacagactaaatcaatgcgctttccaaaattgtatgctttttgcatggtagtaaatggaagagttacactatcctctgttcctgcattgatattcatgttactggttgataagctaacacctacaatctgatagtaaataccatccacacgcaaatattgtccgcatgggtttcctccttggggaaacagttcgtcgtatactcgttttcctatggtgcatactttccggctttccagtatgtctacgtcattgataaagcgccccattgtaatattttgagcttctatcttttcataatcaggctgtaatcctctgacggcacaggagcttttcttgtctccgaaaatagcagtagagccccatcggctgatattgggagtgataacttctacttccggtacggcttggcggatacgttccacatcgttaaactccatatcccaataacgtccttttctaaatcctttataggcttcactggttttattacttccgaaaaaaacggaattggtggcgaatcctttaaagttggccgacatcatatcttgtagtccctggccaccccccataagggcaaccagcatgaatatgccccaaaaaacaccaaaagcggtcaataggctacgtgtcttgtttctggtaatggtgatgaatatttcttcccacctgtctaaatctattctcataattttaatctgctctaagtgcttcgattggtcggatcatgacggccttgcgggcaggaaagaaacctgccagtgtaccggctatcaccaatgtcatggttgcttgtatggctatactgatatctactgtgggattgaggaaaactgtttcggtgaaaacgcctgcgtctacagtttggtttcctgccactgtgttcatgtattccgtggcagcaatgcctgccaccattcctatatacccgaaaaaggtggtaattgttacgctttcggctatgattagccataagatagatataggtttggcacccaacgctttgcggataccaaattcacgggtccgttcttttactgtgatcagcatgatattacttacacctacgatgccactcagcaaagtgaatatgcctattacccaaatggctatagtcagaatgcgcatacctttttcttgttgcaggaattgggtgaaacggttccacatccagatagcgcctttgtcatcagctgtaaaccggtggtgtacgccgatagctttgcggtactccttttcaaagatttcatttttttcttctgtatcgagtccttgtgtcataaatatcaaattgttcagcttgtcacctttattatatatgagttgtaaggtggtgaatgggatgaaggcgttaggttggaaacttcccttgtcggtaaaaaggcctaccacttgatatactactccattggcgttgacaaattttccgatagctttgtctgcgtcttttttaaagagcatttctgcggtttttgtatgaagaatgattacttttcgccgttgacggatatcgatgtcattgataaatcgcccccctgcaggttttactctttctacatccttatgattagggtatactccttccaatgtggtggatacatagtcttgtccatatgttaaagtcacattactctgacgtacggtagctcctacactgatgacatttttgggaaaatcggtttcggttatccgatagtctttattgtccagttcaatgcggcgtccttcttttaatccgtcgtatgctttggaagtccagccgggaaatactttgatggaattcatagccatatctgcagatgagctttcgaaagcatggattagtccgttgcctgcccccagcagtacgatcagcatgaagataccccaagctacggcaaagccggtgaggaacgtgcgtaatttattgcgctttattgttccgaatatttcttgaataagatcaatcatgtgtgtcagttatttcatgaatccgttcttgccgaaaggagaggcattatggtctatgttttcttcaatccgttcaatcagtccgtccttgatatggatgattttgtccgtttggttcgctactccactttcatgagtgacgacaacaattgtcagcccctcgtttttatgcagttctttcagaatattcatcacttccacggatgttttgctgtccagggctccggtaggttcatcggcaaggatgatttgcggtttggatatcaaggcacgtgctatggctacacgttgtttttgtccgccggacaattcattgggcatatgatgcgcccattctttaagacctagtttgtcaaggtattctaatgccatttgattccttttttttcggctcactccctgatagaagaggggaagagctacattttctaccgcatttttaaaagaaatcaggttgaaagactgaaagatgaatcctatcatccggtttctgtattcggcagagcgggtttcactcagattcttgattaatacatcgttcaaataatattctcccgaatcgtaattgtccaagatgcctaaaatattcaataaagtggactttccggaacctgaagcccccataatggaaacaaactcacctcgttctatgtcgaggttgatacctttcaaaacatgtagcggagctccgttatgataggttttgttgatattctctaaatgtatcattaccgatgaatttaacttgtgtttgtctggttagacgtgccgaagatacaaaaagttgcaatgctatatgaaataattgaaaaaaaatttgctctcttttttctcattgtgtacatttgctcaaaataactaaccctaaataataatatatcatggtaacaggcatggaaaaaccctacgtagtaggtatggacattggcggaactaatacagtttttggcatcgtagattcgcgtggtaacgtattggctaccgattcagttaagacacaatcattttctaagatagaggattatgtagaggctgtcagttcaaaattgcgtccgttgattgaatcgttcggtggcgtagaaaaaattaaaggtatgggtgtaggtgctcctaatggaaactactataacggaaccattgaatttgctccgaatcttccttggaaaggggtgattcccttggctactttgtttgaagaagcaataggtgttcctactgccttgacaaatgatgctaatgctgccgctatcggtgaaatgacttatggtgcggctcgtggcatgaaagactttattatgattactcttggaaccggtgttggtagtggtatcgtaataaatggacaactggtttacggacacgatggttttgccggagaattgggacatgtgatcgttcgtcgtgacggacgtcagtgtggttgtggtcgtaagggctgtttggaaacttattgttcggctacaggtgtggcacgcacggcacgtgaatttctggttgcccgtcccgaacctagtttgttaagagatatcccggctgaagatattgtatctaaagatgtttttgacgcggctgtaagaggggataaattagcacaagatatctttgaatatacaggacgtattttgggtgaggctttggcggatttcattgctttctccagcccggaagcgattatcctgtttggtggattggcaaaatcaggtgattatatcatgaagccgatccgtaaagctatagatgataatatcttgaagatttacgaaggtaagactaaattgttgatttctgaattgaaggatgctgatgccgccgtgttgggagctagtgcattaggctgggaagtaagagaataatggaaaacaaaaagcaaggatataaagttcggaaatatcagggaccggtaaaacgttattgccagatgttgaatctgaaaaacgatgcggccttgatagccgagtatagaaagcgtcattcggaaggcaaggtttggccggaaacattggcagctattcgtgaagtcggtattttggaaatggaaatttatatcctgggaactaatttgtttatgatagtggaaactcctctcgattttgattgggatacggccatggccagaatggctacgttgcctcgtcaggcagaatgggaagagtatatgtctgtctttcaacaggcagagccgggagcgtcttcggctgaaaaatggcagttgatggatagaatgttttatctatatgaataactttcattctagataataataagaaaaggatatgataaaaatcatatcctttttcttatattataaaattataaacttgtgttctttatggtagagctcatcaggcattagcctgttggctcattaatttctgaagcttgtattgcaaagattggcaagcagctccctttctcattgctttgtatcttcttaactgatactgcaacatctcgattgtgtcatttgttcttttcataattacatcttttttatgttctcccgtttggagaactggttattcctaaaaaccttttgttttctcttttactactgcaaagataacaccaaaattcctatttatgttttaaaacatagtatcaatccgctttatttaacttttaatgtgtattttgtcttatggtttagtatacgttaagaaatacaactgtaaaaatgtcacttataatctgacagggaaatgttcattaacaaatgtggcggatctccttaaatcatgttagagaacataattttctttttgtcgaatttgcaaatttcaataatgttcgtacctttgcattgtgtttttcatagtattagatttaaggttaacaaaggttggagcaaggcgttgctcctttttttatgtctatatctctgcataaagtttcctttttacaaattgttttgttacattcgcaccatactattgatattaaactactattatgaaacacttatttatcacaattctgctcttattaccattgtgccgcatgctggcacaggagagagaatacgtaattgttgttcatggaggtgccggtgctatggaaaacctcgaggacgataaggagaaatcaaccttgtattatgcggctttagattcagctttgagcattggaaatgctatactgtctgccggaggcgaagggcctgaagcggtaatggcagttgtcaactactttgagaataaccccttgttcaatgcaggtaaaggggctacttgtaccagtgccggtacttttgagctggatgcttctattatggaaggtaaggatttgacagcaggagctgtcgccgggttgaaaacggtgaagaatccgattaatgcagcttatgcggtaaaaactaaaacacctcacgtgatgctggcaggtgagggtgctgaccggtttgcaaagtcacaaggactggaaattgtggataatatgtattttgctactcctaagacgttgaagtggatagaggatttgaagaaggagagcaagaagaatggaactgtgggctgtgtggtactggacaagcaaggtaacctgacagcgggaacaagtaccggtggtatgttcaagaagcaatggggccgtgtgggagattctccggtgattggtgcaggtacttatgcggataatgaaggttgtgctgtgtcgtgcaccgggcatggggagtattttatccgtcacgtcgtagcttataatctttctactcgtgtgaagttgctgcatcagcctgtcggggaggctgccgattatattatccatcaggaactgaataccaaggagggaaatggtggattgattgcagtggacaagaaaggtaattttgccatgccgtttaatagcggaggcatgttccgtggctacttgtataaggaaaaaggaacaggcaaaatttctaaagcagtgggcatagggaagaagatgaaaactttataattttagttcctgtttgaattttcctcccacctgcaacagagttttgcaaaactgctaccactactaccatcctctttcgtaaacacccatgaacagggcgtttcaaaggtggtggtagcagcatgaaaaaacatctgctaccaccactttttatctgttatcacttccctttcctctgatagtttgggaattcctgtcacattttgtcttagcttcgttaccccttggaatagacacatccgtttgaaagctgtaggctgtatgtaacgatacggacggttggtatgcttatcgggaaccggtacggatggcatctcgactattcactgacggaaaagttttggagctgtagaatgttagcgggactttcatccgaaaaaggcatctgcaaaagactttggcatccgattcgtccttaaaggatcttatccgtatccctaaccctttcctgacgtatggttaaggcttttcttcctgcctgttttatctccgcaagcctttggagttaactccatagccttgggagataactccaaagcttatggagataactccaaaggctatggagatagaacatatccgtataaaaaggcttaacctggagaaagaaaaggcttatgctatagggtagggagtgatatacattcaattgaggcttgactactcctacagtcatgatgtttgaagcgatgctggatatcctgccggttcgctgatgcggctgtaaccggaatataatatgcggcaggctggtaatgatcagacatttagggaacgtttggatactatccgtaaatacgccgttttgctataaaatgctgtctcgctgcggcttgatcggttgcaggtgcactcactgagcatgaggtaaaaaacattggcggaattaattcagtctttcaaatacagtctggattaactccgccaataggctgccactatcggatatcttatttataagtaaccggtatcaaccttacactaccattcaatcccgatggcaatggttgccaatcagtataaggtaccggtttgtattgcagattcaccacattgatttcattgaagatacgccatttctcaccccgacgatccatatccgcaatgcggttggcaggcagattggtcacttctatttctatcttgttatctcccggtttcagccatttgcctactttcaactgataaggtacggcccatgccgttccggcatcttgtccgttgatgcgcacacgggcactttcccgcacatcgcccaaatccagtatccagtcatcggcgggaatatggggaacagtgatgatattggtatatactcccgccgccatggtaatcggagcgttggggtgagcaatttcagtccacgaagacggagtgtcgatatcaaatgtaccttctatccggggagtgctttttgtaaaatgaagtttccagccgtgatcaaggctgaggctgacaggttgttcttgaacgtatttccattcggcaacgtctgtcagggcatggttgaaagtttgcaggatcacgctttcgccggaatgcagttggaggtgtacttgggttttgccttcttgcttgcgggtttgtgctttccctttttctcccgtcatcggattgaacagcatgacactttctgcgggaacggctaaggttatccagtcgtttactcctttttcctgcaatgaggagatgaaataatgatgtccatcggcatgggagcggcggatacattgtaagccataccgcgttttcatctcttcgggaacaacaccgcttttttccaaggcagattgatagttgtttcctgtaatgatgatccctttttgataaggagttgccaccgtctcatcgaaagaagcaatttccggaagttgcttttgtaattgcgcaaagcctttccggcgtgcttccagttttccataaccgggtacatcctgcggatagttttcggtaaagatgatagtagctccggcttgtgccagctttagtaaatggccgagtacctcggacggcattagttttacagcaggaatgatgatggccttataggaagttcctcctttggtcagtaatttgccatttacgcaacgggtgcttttcacaaagttgtcagagatataatccatgtcatagccgcaattgctgatggtatgaacggtctctataaacttgggagcacgttttgccatatcatggatgctgaacagcaaaagacggcccggctgttcctgccacatatcatatacaggcagataaacaagaaaatcattgtccggttttcccatttgcaggaaagactggcaacgggtgatatattcaaagaaagcaggagcatcctgccaaatgttattggtaggagacatgtcaatagaggcatagaacttccatcccggccatttggcttctttgggactgtagggagttccgtggaaaaacatgtggtttacacctgatacgaacatcaaatccatatccggtttgcactgggaaagtgaggtacggaaatgttctgtcagccaggtgaatgtttcggatgaggtgtaaggctttccggcgatatgggcagcggaagaggcatacttcagcatggaaaggtcggagtcattcttacgtgtcagggaatcttgacgcaatcctttaatatggaattgcgacaggccgaacccttcgcattcgggaatatccacggaggcataggtatctatcagattggcaggggaaccatgtgcctggttacgggtgatgctgccgtgaccgtgtgcccagttagtccattgggtactgaaattctcaatcaataaatcggagatggtttcgcgatagtcactgactatgcgggcggtggtttcattacggtcctgagctataaattcagggaagtgttcttccagtttatagccgcgacggcgggcgaattgttccagaaaatcaggagtccagtcagcaccatatacttcgtaagagtcattgaaaaaagtatgtggaaaattggtcttgttttctttaaaggctttgtcaaagttggcaaaatagcgttttacggctcctttatccaagtggttcatcacatagccttctccaccgggagcagcacgtttcactttttggaaagtcttgcctatatataaggtgatgatattccaatgtcctgccggagctttccattgtaattgtccgttcttcgctttggaagtgaggttaagacattgcttattgtccgcattataggccataacccggcttaaagtggctacagggcgttgtttttcttcttctactttcaaatctagcgtaatttcttttccaccctctacttgataggattgaaaaatagctttggtagcagcatctgtcatactcacgtgaggaccgccgaagggccatccggtaccggtgttcatatctacttcaataccgatacgttttccttcagcttcagtatgttgcaacatattcatccattgcgggctgaggaaaggaaggttattcttatcgttgccttgaacaccataaataggagtgatttcaacacctcccagtccggctttggcatattcttccagattgtaggtcagattggttgcatcgacagcacttcccagccaccaccagcgggtggcggggcgagcttcgggtcgcactgccggccattcttgtgcgtaaaggcagcttccggccagcaacaggctgaaaaataaatattttctcttcattctattttgttttttattagttggctgtattgaactcttttccatccactgtgatgttcctgtatctgatatcactggcatcatccgtgacaaacaagggacgtccgtccgctttctcgtaatggaaatttacattgtccaaggtgatgttgcgtgcgtggcggatgtagaaacctttggcgggaatcgttccgaacatccacggttcaggatatactttctcttgttcgggaggagtcagaagtccgtcggcttctgtatatcctccttggtgatagatatgaatatcgctcagtgtcacatcttcaataagggctcccggtattccgctgataatggaggagtagcgcgagtcggcattaaatacattgacgtggctgatgaggatgcgtttcattgtgcccacgggtgttccttgcgggctgcgcatccgggctcctaaccgcaggaagatgggggcgttgacaatatcgcgcatcgtgatgttactgatgacgatatcttccagtttgccaccgtccactgtttccagggcaagtccgcgacaacgctcgaagatgcagttggtgatggctatgtttttgaaaccgccgctggattccgttcctaatttaatgcgtcccgttacaaatccgtgatccggcgcttggggctcgtccctttgccaagtgcaatccaatacactgccacggtcgtatccgctgacaaaacaatcggagatggttacattttccgtatccttgaaatagcctaatccgtaggacgctttaagcacgatagcgtcatcccagggagcgttgacggtgcaatgactgatgcggacatttttgcagcagtctatgtcaaaaccgtcccggttggtatctactttcacgttcagaatgctcagattgtctactcctgtagccagcaggccgaaatgaccgcaatgcaacaaagagaagtctttcaatgtcacgttcttgcagagtttcaagctgatggctttattgcctacaccgggcaggcggctttcctcacgggtgagtcctttgccataaatcagtcccggtccgctgatggtgatgtcttccagaccgattccccaaataagtgagttcttccaatgactgtgtccgaaatcctggaattgggtgtgttcatttggttctgccgggtcatagccttccgttgctgatggaaaggcgccgacaatccgtgctccttgttctatatacagatgtatatggctggccaaacgtatggaatagcaggcgtattctcccgcagggaaataaacggttcctcccccctgggaggcagcttcctcaatggcccggtttatggcggggctatcaatggtagtaccgtcggctttcgctccgtaatcttttacattatagatctttgcctgtgctgtccatgtgctgaggcataaaaggaagagtatgagttgtttcatggtctgtctttgcttttactgaatgggcattagtttgaatttgcgtaaataagatgcattgccatacatggtatgctcatcggataaattccagaatccgtctttagaggcagggtgggcatcccagtcaatcaccgcccagcatagtccgatttcatttccttcctttaataaagtagggcgagatagttcgggaccgtcggcatccgcatggtcaaagggggtgatatagaattccaataccagcttacccgcttctccctccttgaaagagtactgataggcataatcagcgtatggcttttgtttcagccatacctgaggaccccataacatacaccagtcattgccgtgagccggggtgaagatgtgatagttctgggcatggcatccgtgaaatttgaaccaagcctgccacacatctttgggagctgtgggatgaaaacggtcgatgaacggcccccctgaacaatcgccatccaccactacttcaaaaatatccgtgttcaaggagttctcactgaaccgccaataattatcgtatgcttcatatagaaaatacaacttctgagtttctgcacaccaacctactttgacactgactttcaatgtggtagtgtccggctgtgcatgttttccctcgtcttcctttaaagctgcttccgttatcttataatcagccggaacgcaatcccagtcgtgggtattgccatctatggcaggaaccttatctgccggaaattggtacaccttgaattcctgtgcctgggcagacaggcataggaaaaggaagaacaggtatggatacaatcgtttcattttgatcgggttttatgttctttcccgaatagtccgggtagcatgaaataattataatcgcctcgttggtagaaacagaagtagagcttttcttgcggtttccacgggcatagggcagagatgacgggggcatctgtctttttaccggagttgaataaagcaagcggggatgcttgtttatgtccgtcggacagacgaatatcggaaccgatgggagataccccatgaaccgttctcagtttcatgctttcaccataataggtggtaaaagcgtttccttctatactgaatacattatggaagcaggaggctaccggaatactgttgtctgttacggcagagtcgtctgcaccgtcgcatgcaccgaaagcccagcaaagtttgagctcttcgggtaatcgctcacccgaaacctccatgataaaaccattactattcgtcaatggacatacaatcagctttatttcaccttctttccataatttatctttaatggtataagcctgtccctttttcttgacactgcattggtccagccagcaactttcattgccgcaaaccactcccagacggaaagttcccgcacctttggataaacggaagggaagagtctgggcgttgttgccaaagacagacaacagcatacagagaaagaacggaagtagccgccggctataattccatgttgttttcatagctgatattgatttgtgcgttcttattgtttttttcttccacacgactgccgtcttctacttgtaaccggacatcttccaggtggaagtcttcggtaaagataatgcttcctgctttatttaccttggcttttatgccggaaatatggaaattctgcaaaggcagttcctcattccagccggcagcggtgataaaggtttgcacattagtagcttttacatcgctgagccatacattacggaaatgcggataccctttttctttaggtgtgacaggagtcagcataaccttccaatgttcgggaatttccttaccttcatattcagccggtaaggtagaataactatagctggggttccagttcaggtccgctgccagtacatggcggacatggtctgctgtcacttgggtcatgtagatattttctacggttccaccgcggttcatggcagatttcagacggagggtggaagaggttccgtatgcttggaggttatatcccaatacatttcggatgcagcctgaagtttcgctgccgcaggtaatcagtcccgcacctttacgtgcaatgcatccacgaacaatgatattttcagtggggcggtttacgcgcaggccgtcggcatcccgtccggctttcagacagatattgtcatcgttgcaatctacttcgcagttttcaatcaggatattggtgctggagtcaatgtcaataccatccgtactgggaccatgcccccctacgttattattgattttcagtccgttcaaggtacattggtcggaatacagcacttggcaaccccaaaatccggtacgcatcaaggtaaagtcttttagtgttatatggcggctgttcgagatgagcatacctcttacgcgtttacagtcgtagtccacgatccaccgcagtttgcgtttctcgtaatccttccgcatggtccaatatttatcccagaatatttttccacggcaatccaacgtacctgctccgctgatagctgcgttttccgcatccagaatattgatgactgccgatggccataccatttcgatacctgccacgcgggagcgcatttcggggtataaatcaatatcctcgctggctatcagcgtcgtaccttggttgaggtggaggtttacattacttttcaggtagatggcaccaatccggtagtatcccggggctacttccactgttccccctccggaacggtggcattcgtcaatggctttctgcagggcggcagtgcttaaccgggtgctgtcatttttcaatccgtaatcggctgcttggaatatttttcccttcggataggttttggctcctacttgggcagtccacgaaaggtcaggagttcccatcccttctccccattggaatccggggagggattgggcattggtaaagagggtacctaaggtaaatgatagggttaataataatgttttgttgttcatttgttcctacttttaaattaattgccgtccggcttttcaatttctgtaaacgggctgtcattccatttgaaactgtccaaagcatccggatgtgcagggttgtaaccggaatagtcgctgcgtaaatagttagagataggtaatcccgctttctttatcccttcaatgatacatttggagatttgataagctccgtaaggattgaagtgggtattatctgccaataccctgttttgtcccggataggttccggcaggataatgtacgaatgcctttttggaaggttccactcccattgcttcatagagggtacgggtcatttcgttgagatcgatcaaaggaacgttttctttggcagccaaccagcgcattgcttcgggataatcttcgtgagtatctctgattttcccgttttcatcgaaactgcggcgttgtgtcggggttaccagtacaggataggctcctcgtgcccttgcctcatcaatgaatgttttcaagctggtcataaatgaataataagctcctttaccgggacctttttgcttttggtcgttgtgaccgaattccataaaaatataatctccgggtttcatttgtgtcaatgcctttttcagtcgtcctgcaccgataaaagtattggcgctttcgccggattctgcataattggcaaaacaaatgctgtcattgaagaagcggggaatcatttgtccccagcttgcccaaggttcattgtcctggtctactaccgtggagttaccgcataggaatacggtgggtacattatttattttctcaataatcagttcggacaattggggtgcatccccgttgaattccaaagttagtttgtcatcccagttcaatttttggcgttcacgcggtttgatgcgcacattttctttttccgaaatatgtgtgttgcgcttgttgatcacgaatgtacaagattttaactcccctttttttgtcttcacattttcgaagaaaaggcggcgtgattctcctcgcactgttgtttctccggcagcgcgtttgtttcctatcacggctgtgacatggtagtttccatcgggaaccgtaacagagaaaaagaatggagctgtacttttaccttccggagagggctgtctgtcatatccgtatcccttttcctccgagtatctgtcggcgggagttattttggtataaccgtctttcgtctttttacctgtggtaaaatcgaatttgtaagtttgtgcttcgactcctaatgtcgctaaaagtccaagagctaatagggctatctgtttcatgattgatatagattgttattaattgattttcggttttagttcatccggagagtcattggtataagatttgatatcaccggctgtttttgtgaacaactcactgatttgttgaggcgttacagtaaattgcggacggaactggtccgaattcatataatccaaaatggctttatgcatctgacgggctacaatgcgtttctctggctgggaggtaatgtccatacttgtcatgagcactttcccatttaatacattggcttcgaataacatacctatcttgcggcttataaaccaagtgtcgatgctttgaaccgtaggttggaaagcgggtggaaagtgggtgaattgcatcacttgagcacgattcagcagttcccaccattgcagattgctgtgatattctgtcggaaactgacggaataacgggtgtttggggttcactaagatacctgtggtatgaggaggacgcattttgaaccaggaggtgttccagaatacaggagtgaattgctggaccacttctttaccataactcactttgcccgcagctgtaataagcacatttccaccattctgaagaatttccagggctttcgaatccaaggtgtcggtagtgtatacttttccttcggctattgtcacttgagcgggataaacccagaaattccagtcatttacagcttctgttcccataatgcgtatttccagattcagctttttagcctcttggatgtcagtaagcggaaactcaaggctacctgtgcgatttaaatttccgacaggaatgtcttgtgttgccaatgtgccttgcgcatatactttgccatattcgtcttttaacgtatatacaatttctgcttgttttaatgcctcggcaccaaaatgagcgatttcaatatccgcctttaaaatttccttgttattatatacaaatttatctgtacgcatcagtggaactgtaggtgagcagaaacgtctccattctgcggagttgatatatcctttttcttcaaagaaaacatcgagaacacctaccagtgcagttccctgacccgaataatcgttcagtgccaataattggaaaccggcataatcgggcgtgcggagtgtcttttctatttcatatttgtaacaaagggcttgcaactttccgctggccatcataaatagatgggcttggtcgctcatgtggttgtcagccagaatgtctttgaaaatctcgaagttcttggctttattgacgcctgtatatttacgtatttcattgaaattggggaaagcgcaccattgacctgtttcatgggatacgtagggctgtctcacggtgtcaagatgattttggaaacgatagtcgtcttgggtggacggttgtttcttggaccaggtcaggccacgtgccccagcctttacatgatattggttgcgaggttgccattgccatccgttgcctaccgatgctccggtatatacatgtctgggatccttcttttcccaatattctacgaacttggtcacccattctacccagcgtccgctaggttcgtttccgcatgccaacatgcaataggaggcatagttgccatattctttggttaatgcgatggtttcgtccatcagatatttgtcaataggttgtcccaaacctaatttgggaccatgattgggccagctcggaccttcgggttgcagatagaatcctacccggtcggcagccataaaagcggcttcgggaggacagaatgaatggaaacgcatgtgattcagtccataactgcgacagatacggaatacccgttcccaactttctacatccatcggagcgtaaccggtcaacgggaagtcacagttttcaactgttccgcgaagctgggttttgcgcccgtttacataaaaccatttacctttgatttcaaatcggcgtataccgaattgtatttcctttatctcagtttttttcccattggtgacttctgctttcagtttgtacagggccggatgaaattcatcccatagcagcatatcattccccataggtaataccatttctgtttccgtcactcctttgttaagtttgatttcttgttgtatggcgggaactatatgctttttatccgtattgaagctctctgctgataattttacttttgcagtgcctgtacctttgatgacgactttgacacgtgccagtttttgttccggttccggatatatttgaatatcatcgaaatatgttttcggagtcgtttgcagacagatgcgtcctacaatgccgttccagtttccttgggtctggtcggttatgctgtgcgaatccggtccgacattgatttctttgatacgattatccacccggatggtgatagtacattttccgggacggacataacgggttatatcatattgatggggaacacaaagactattctgcattcctgtcttttgtccgttcacccatacggttgtttctatatggggacgttccaggaacaacaaaatacgttcacctttccagtcggcaggtatattcacctctttctgataccaagcagctcctacataatgtttgtcgggagtcagaaagaatggaaatttaatattaccttctttacggtatttttccatgtatggattataatagtaggaactgtcatagagactgcctgtccattgggtctttgcggtaacctcatcacctttcagtttctcgggcatggaaccgggcaggttgatgaagtcattcaaagtgtggctgaaccatttttccttttctccattatcctgacggtctatactgaatgaccattttccggataagtcaataattttttgtgcgcttaacgagaagcacatccatactaggcagattgtcaataacgtttttttcatagtatctttttactttgaatttgatgttgctaaattaaggccttttcatctgcatgtaaatagaaagaagtacatatagatggaaattcgtataaaataggggtaatgtgcgatatatttgtacgattttacatggatatgccttgtatgtgcagaaaaaagtccaaatctctttttatctttgtat
